(19) United States
(12) Patent Application Publication
(10) Pub. No.: US 2018/0125988 A1
(43) Pub. Date: May 10, 2018

(54) TARGETED XTEN CONJUGATE COMPOSITIONS AND METHODS OF MAKING SAME

(71) Applicant: AMUNIX OPERATING INC., Mountain View, CA (US)

(72) Inventors: Fan YANG, San Jose, CA (US); Volker SCHELLENBERGER, Palo Alto, CA (US); Sheng DING, Foster City, CA (US); Desiree THAYER, Burlingame, CA (US); Chia-Wei WANG, Santa Clara, CA (US)

(21) Appl. No.: 15/525,819

(22) PCT Filed: Nov. 11, 2015
(86) PCT No.: PCT/US15/60230

§ 371 Date: May 10, 2017

Related U.S. Application Data
(60) Provisional application No. 62/211,378, filed on Aug. 28, 2015.
(60) Provisional application No. 62/119,483, filed on Feb. 23, 2015.
(60) Provisional application No. 62/078,171, filed on Nov. 11, 2014.

(51) Int. Cl. A61K 47/55; A61K 47/68; C07K 14/00; C12N 15/70; A61P 35/00

(52) U.S. Cl. CPC A61K 47/551; A61K 47/6803; A61K 47/6855; C07K 14/00; C12N 15/70; C12N 9/6421; C07K 2319/01; C07K 2319/30; C07K 2319/50; C07K 2319/70; A61P 35/00

(57) ABSTRACT

The present disclosure provides drug conjugate compositions, and compositions and methods for preparing and using the same. In some embodiments, the present invention relates to targeted conjugate compositions comprising cysteine-containing domains (CCD) linked to targeting moieties, extended recombinant polypeptides (XTEN)and peptide cleavable moieties, with pharmacologically active payload drugs cross-linked to cysteine residues, resulting in compositions that can be cleaved by proteases associated with target tissues. The invention also provides methods of making the targeted conjugate compositions and methods of using the targeted conjugate compositions.

### CROSS-REFERENCE

[0001] This application claims the benefit of U.S. Provisional Application No. 62/078,171, filed Nov. 11, 2014; U.S. Provisional Application No. 62/119,483, filed Feb. 23, 2015; and U.S. Provisional Application No. 62/211,378, filed Aug. 28, 2015; all of which are incorporated herein by reference. This application is related to U.S. Provisional Application No. 62/254,076, filed Nov. 11, 2015, which is incorporated herein by reference.

### SEQUENCE LISTING

[0002] The instant application contains a Sequence Listing which has been submitted electronically in ASCII format and is hereby incorporated by reference in its entirety. Said ASCII copy, created on Jan. 12, 2016, is named 32808-753.601_SL.txt and is 1,419,218 bytes in size.

### BACKGROUND OF THE INVENTION

[0003] Many approved cancer therapeutics are cytotoxic drugs that kill normal cells as well as tumor cells. The therapeutic benefit of these cytotoxic drugs largely depends on tumor cells being more sensitive than normal cells, thereby allowing clinical responses to be achieved using doses that do not result in unacceptable side effects. However, essentially all of these non-specific drugs result in some damage to normal tissues, which often limits treatment.

[0004] The use of cytotoxic drugs linked to antibodies or other molecules that bind cell ligands, generally called by the acronym “ADC” (antibody-drug conjugates), are meant to further increase the therapeutic index (or therapeutic window) by selectively delivering the cytotoxic drug to the cancer cell. While the ADCs offer great promise, the numbers of approved drugs remain low, their manufacture is complex and expensive (humanization of murine monoclonals and the large number of mutations typically required to humanise such antibodies), and the pharmacokinetics of many are insufficient; e.g., use of antibody fragments such as scFv in the ADC. Additionally, the size of antibody-based ADCs is a limitation with respect to the ability to of such compositions to penetrate solid tumors or tissues and organs haboring cancer cells.

[0005] Extending the half-life a therapeutic agent, whether being a therapeutic protein, peptide or small molecule, often requires specialized formulations or modifications to the therapeutic agent itself. Conventional modification methods such as pegylation, adding to the therapeutic agent an antibody fragment or an albumin molecule, suffer from a number of profound drawbacks. While these modified forms can be prepared on a large scale, these conventional methods are generally plagued by high cost of goods, complex process of manufacturing, and low purity of the final product. Oftentimes, it is difficult, if not impossible, to purify to homogeneity of the target entity. This is particularly true for pegylation, where the reaction itself cannot be controlled precisely to generate a homogenous population of pegylated agents that carry the same number or mass of polyethylene-glycol. Further, the metabolites of these pegylated agents can have sever side effects. For example, PEGylated proteins have been observed to cause renal tubular vacuolation in animal models (Bendele, A., Seely, J., Richey, C., Sennello, G. & Shopp, G. Short communication: renal tubular vacuolation in animals treated with polyethylene-glycol-conjugated proteins. Toxicol. Sci. 1998. 42, 152-157). Renally cleared PEGylated proteins or their metabolites may accumulate in the kidney, causing formation of PEG hydrates that interfere with normal glomerular filtration. In addition, animals and humans can be induced to make antibodies to PEG (Sroda, K. et al. Repeated injections of PEG-PE liposomes generate anti-PEG antibodies. Cell. Mol. Biol. Lett. 2005.10, 37-47).

[0006] Thus, there remains a considerable need for anticancer agents that can penetrate and/or attach to tumors or cancerous tissues and deliver cytotoxic compounds to the cancer cells, as well as having sufficient half-life and enhanced selectivity such that the overall therapeutic index is improved.

### SUMMARY OF THE INVENTION

[0007] In some aspects, the present invention discloses targeted conjugate compositions comprising one or more extended recombinant polypeptide sequences (XTEN), one or more peptidic cleavage moieties (PCM), one or more targeting moieties (TM), and one or more molecules of a payload drug, wherein the PCM is capable of being cleaved when the conjugate composition is exposed to the protease. The present invention also relates to methods of treatment using the disclosed conjugate compositions in treatment of a disease.

[0008] The compositions and methods disclosed herein not only are useful as therapeutics but are also particularly useful as research tools for preclinical and clinical development of a candidate therapeutic agent. In some aspects, the present invention addresses this need by, in part, generating targeted conjugate compositions with payload peptides, proteins and small molecules, as well as targeting moieties that target tissues bearing certain ligands, and that have peptidyl cleave moieties that are capable of being cleaved by proteases when in proximity to the target tissues or target cells. The targeted conjugate compositions are superior in one or more aspects including enhanced terminal half-life, targeted delivery, and reduced toxicity to healthy tissues compared to unconjugated product.

[0009] It is specifically contemplated that the cleavable conjugate composition embodiments can exhibit one or more or any combination of the properties disclosed herein. It is further specifically contemplated that the methods of treatment can exhibit one or more or any combination of the properties disclosed herein.

[0010] In one aspect, the present disclosure provides a cysteine containing domain (CCD). In some embodiments, the CCD comprises at least 6 amino acid residues, wherein the domain is characterized in that: (a) it has at least one cysteine residue; (b) it has at least one non-cysteine residue, and at least 90%, or at least 91%, or at least 92%, or at least 93%, or at least 94%, or at least 95%, or at least 96%, or at least 97%, or at least 98%, or at least 99%, or 100% of the non-cysteine residues are selected from 3 to 6 types of amino acids selected from the group consisting of glycine (G), alanine (A), serine (S), threonine (T), glutamate (E) and proline (P); (c) no three contiguous amino acids are identical unless the amino acid is cysteine or serine; and (d) no glutamate residue is adjacent to a cysteine residue. In some embodiments, the CCD has between 6 to about 144 amino acid residues and between 1 to about 10 cysteine residues. In some embodiments, the CCD comprises at least 2 cysteine residues, and any two adjacent cysteines are separated by no more than 15 non-cysteine amino acid residues. In some embodiments, at least one cysteine residue is located within 9 amino acid residues from the N- or C-terminus of the CCD. In some embodiments, the CCD sequence has at least 90%, or 91%, or 92%, or 93%, or 94%, or 95%, or 96%, or 97%, or 98%, or 99% identity or is identical to a sequence selected from the sequence set forth in Table 6.

[0011] In one aspect, the present disclosure provides a fusion protein comprising any CCD disclosed herein. In some embodiments, the fusion protein comprises the CCD fused to an extended recombinant polypeptide (XTEN), wherein the XTEN is characterized in that: (a) it has a molecular weight that is at least 4-fold, at least 5-fold, at least 6-fold, at least 7-fold, at least 8-fold, at last 10-fold, at least 20-fold, or at least 30-fold greater than the molecular weight of the CCD; (b) it has between 100 to about 1200 amino acids wherein at least 90%, or at least 91%, or at least 92%, or at least 93%, or at least 94%, or at least 95%, or at least 96%, or at least 97%, or at least 98%, or at least 99%, or 100% of the amino acid residues are selected from 4 to 6 types of amino acids selected from the group consisting of glycine (G), alanine (A), serine (S), threonine (T), glutamate (E) and proline (P); (c) it is substantially non-repetitive such that (1) the XTEN sequence contains no three contiguous amino acids that are identical unless the amino acids are serine, (2) at least 90% of the XTEN sequence consists of non-overlapping sequence motifs, each of which comprise 12 amino acid residues, wherein any two contiguous amino acid residues does not occur more than twice in each of the sequence motifs; or (3) the XTEN sequence has an average subsequence score of less than 3; (d) it has greater than 90% random coil formation as determined by GOR algorithm; (e) it has less than 2% alpha helices and 2% beta-sheets as determined by Chou-Fasman algorithm; and (f) it lacks a predicted T-cell epitope when analyzed by TEPITOPE algorithm, wherein the TEPITOPE algorithm prediction for epitopes within the XTEN sequence is based on a threshold score of −9. In some embodiments, the sequence motifs are selected from the group consisting of the sequences set forth in Table 9. In some embodiments, the XTEN has at least 90% sequence identity, or at least 91%, or at least 92%, or at least 93%, or at least 94%, or at least 95%, or at least 96%, or at least 97%, or at least 98%, or at least 99% sequence identity, or is identical to a sequence selected from the group of sequences set forth in Table 10 or Table 11. In some embodiments, the fusion protein further comprises at least a first targeting moiety (TM) wherein the targeting moiety is capable of specifically binding a ligand associated with a target tissue. In some embodiments, the TM is joined to the N-terminus or the C-terminus of the CCD. In some embodiments, the fusion protein is configured from the N-terminus to the C-terminus as: (a) (TM)-(CCD)-(XTEN); or (b) (XTEN)-(CCD)-(TM). In some embodiments, the TM is fused to the CCD recombinantly. In some embodiments, the TM is conjugated to the CCD using a linker sequence selected from the group consisting of the sequences set forth in Table 12. In some embodiments, the ligand of the target tissue is associated with a tumor, a cancer cell, or a tissue with an inflammatory condition. In some embodiments, the fusion protein further comprises one or more drugs or biologically active proteins, wherein each drug or biologically active protein is conjugated to a thiol group of a cysteine residue of the CCD. In some embodiments, the target tissue is a tumor or a cancer cell and the drug is a cytotoxic drug selected from the group consisting of the drugs of Table 14 and Table 15. In some embodiments, the target tissue is a tumor or a cancer cell and the drug is a cytotoxic drug selected from the group consisting of doxorubicin, nemorubicin, PNU-159682, paclitaxel, docetaxel, auristatin E, auristatin F, dolastatin 10, dolastatin 15, monomethyl auristatin E (MMAE), monomethyl auristatin F (MMAF), monomethyl auristatin D (MMAD), maytansine, mertansine (DM1), maytansinoid DM4, calicheamicin, N-acetyl-calicheamicin, vinblastine, vincristine, vindesine, vinorelbine, camptothecin, topotecan, irinotecan, SN-38, duocarmycin A, duocarmycin B1, duocarmycin B2, duocarmycin C1, duocarmycin C2, duocarmycin D, duocarmycin SA, duocarmycin TM, duocarmycin MB, duocarmycin DM, mitomycin C, rachelmycin, epothilone A, epothilone B, epothilone C, tubulysin B, tubulysin M, pyrrolobenzodiazepine (PBD), bortezomib, hTNF, I1-12, ranpirnase, and Pseudomonas exotoxin A. In some embodiments, the drug is monomethyl auristatin E (MMAE). In some embodiments, the drug is monomethyl auristatin F (MMAF). In some embodiments, the drug is mertansine (DM1). In some embodiments, the target tissue is a tumor or a cancer cell and the biologically active protein is selected from the group consisting of TNFα, IL-12, ranpirnase, human ribonuclease (RNAse), bovine pancreatic RNase, pokeweed antiviral protein, Pseudomonas exotoxin A, gelonin, ricin-A, interferon-alpha, interferon-lambda, urease, amatoxin, alpha-amanitin, beta-amanitin, gamma-amanitin, epsilon-amanitin, bouganin, and staphylococcal enterotoxin. In some embodiments, the at least first TM is selected from the group consisting of an IgG antibody, a Fab fragment, a F(ab′)2 fragment, a scFv, a scFab, a dAb, a single domain heavy chain antibody, and a single domain light chain antibody. In some embodiments, the at least first targeting moiety is a scFv. In some embodiments, the scFv comprises a VL and a VH sequence of a monoclonal antibody, wherein each VL and VH has at least 90%, or 91%, or 92%, or 93%, or 94%, or 95%, or 96%, or 97%, or 98%, or 99% identity or is identical to a VL and a VH selected from the group consisting of the VL and VH sequences set forth in Table 19, and further comprises a linker sequence selected from the group consisting of the sequences set forth in Table 20 wherein the linker is recombinantly fused between the VL and the VH. In some embodiments, the scFv is configured from the N-terminus to the C-terminus as VH-linker-VL or VL-linker-VH. In some embodiments, the scFv comprises heavy chain CDR segments HCDR1, HCDR2, HCDR3, light chain CDR segments LCDR1, LCDR2, LCDR3, and framework regions (FR) from an antibody selected from the group of antibodies set forth in Table 19, wherein the heavy chain CDR and FR are fused together in the order FR1-HCDR1-FR2-HCDR2-FR3-HCDR3-FR4 and the light chain CDR and FR are fused together in the order FR1-LCDR1-FR2-LCDR2-FR3-LCDR3-FR4, and further comprises a linker sequence selected from the group consisting of the sequences set forth in Table 20 fusing the light chain segments to the heavy chain segments, wherein the scFv is configured from the N-terminus to the C-terminus as VH-linker-VL or VL-linker-VH. In some embodiments, the fusion protein comprises a second scFv wherein the second scFv is identical to the first scFv and the first and the second scFv are recombinantly fused in series by a linker selected from the group consisting of SGGGGS (SEQ ID NO: 1),GGGGS (SEQ ID NO: 2), GGS, and GSP, wherein the scFv are recombinantly fused to the N-terminus or the C-terminus of the CCD. In some embodiments, the fusion protein comprises a second scFv wherein the second scFv is capable of specifically binding a second ligand associated with the target tissue, wherein (i) the second ligand is different from the ligand bound by the first scFv, (ii) the first and the second scFv are recombinantly fused in series by a linker selected from the group consisting of SGGGGS (SEQ ID NO: 1),GGGGS (SEQ ID NO: 2), GGS, and GSP, and (iii) the scFv are recombinantly fused to the N-terminus or the C-terminus of the CCD. In some embodiments, the second scFv comprises a VL and a VH sequence of a monoclonal antibody, wherein each VL and VH has at least 90%, or 91%, or 92%, or 93%, or 94%, or 95%, or 96%, or 97%, or 98%, or 99% identity or is identical to a VL and a VH selected from the group consisting of the VL and VH sequences set forth in Table 19, and further comprises a linker sequence selected from the group consisting of the sequences set forth in Table 20 wherein the linker is recombinantly fused between the VL and the VH. In some embodiments, the second scFv is configured from the N-terminus to the C-terminus as VH-linker-VL or VL-linker-VH. In some embodiments, the second scFv comprises heavy chain CDR segments HCDR1, HCDR2, HCDR3, light chain CDR segments LCDR1, LCDR2, LCDR3, and the associated framework regions (FR) from an antibody selected from the group of antibodies set forth in Table 20, wherein the heavy chain CDR and FR segments are fused together in the order FR1-HCDR1-FR2-HCDR2-FR3-HCDR3-FR4 and the light chain CDR and FR segments are fused together in the order FR1-LCDR1-FR2-LCDR2-FR3-LCDR3-FR4, and further comprises a linker sequence selected from the group consisting of the sequences set forth in Table 20 fusing the light chain segments to the heavy chain segments. In some embodiments, the at least first TM is selected from the group consisting of folate, luteinizing-hormone releasing hormone (LHRH) agonist, asparaginylglycylarginine (NGR), and arginylglycylaspartic acid (RGD). In some embodiments, the at least first TM is non-proteinaceous. In some embodiments, the at least first TM is folate. In some embodiments, (a) the target tissue has an inflammatory condition; (b) the drug is selected from the group consisting of dexamethasone, indomethacin, prednisolone, betamethasone dipropionate, clobetasol propionate, fluocinonide, flurandrenolide, halobetasol propionate, diflorasone diacetate, and desoximetasone; and (c) the targeting moiety is a scFv derived from a monoclonal antibody capable of specifically binding a ligand selected from the group consisting of TNF, IL-1 receptor, IL-6 receptor, a4 integrin subunit, CD20, and IL-21 receptor. In some embodiments, the scFv comprises a VL and a VH sequence of a monoclonal antibody, wherein each VL and VH has at least 90%, or 91%, or 92%, or 93%, or 94%, or 95%, or 96%, or 97%, or 98%, or 99% identity or is identical to a VL and a VH selected from the group consisting of the VL and VH sequences set forth in Table 19, and further comprises a linker sequence selected from the group consisting of the sequences set forth in Table 20 wherein the linker is recombinantly fused between the VL and the VH. In some embodiments, the fusion protein further comprises a peptidic cleavage moiety (PCM) wherein the PCM is a capable of being cleaved by one, two, or more mammalian proteases. In some embodiments, the fusion protein further comprises a peptidic cleavage moiety (PCM), wherein the PCM is a capable of being cleaved by one, two, or more mammalian proteases, and wherein the fusion protein is configured from the N-terminus to the C-terminus as: (a) (TM)-(CCD)-(PCM)-(XTEN); (b) (XTEN)-(PCM)-(CCD)-(TM); (c) (XTEN)-(PCM)-(TM)-(CCD); or (d) (CCD)-(TM)-(PCM)-(XTEN). In some embodiments, the fusion protein further comprises a second XTEN identical to the first XTEN wherein the first and the second XTEN are both conjugated to the N- or C-terminus of the PCM using a trimeric cross-linker. In some embodiments, the PCM comprises a peptide sequence having at least 90% sequence identity or is identical to a sequence selected from the group of sequences set forth in Table 8. In some embodiments, the mammalian protease is colocalized with the target tissue. In some embodiments, the mammalian protease is an extracellular protease secreted by the target tissue or is a component of a tumor extracellular matrix. In some embodiments, the mammalian protease is selected from the group consisting of proteases set forth in Table 7. In some embodiments, the mammalian protease is selected from the group consisting of meprin, neprilysin (CD10), PSMA, BMP-1, ADAMS, ADAMS, ADAM10, ADAM12, ADAM15, ADAM17 (TACE), ADAM19, ADAM28 (MDC-L), ADAM with thrombospondin motifs (ADAMTS), ADAMTS1, ADAMTS4, ADAMTS5, MMP-1 (Collagenase 1), MMP-2 (Gelatinase A), MMP-3 (Stromelysin 1), MMP-7 (matrilysin 1), MMP-8 (collagenase 2), MMP-9 (Gelatinase B), MMP-10 (stromelysin 2), MMP-11(stromelysin 3), MMP-12 (macrophage elastase), MMP-13 (collagenase 3), MMP-14 (MT1-MMP), MMP-15 (MT2-MMP), MMP-19, MMP-23 (CA-MMP), MMP-24 (MT5-MMP), MMP-26 (Matrilysin 2), MMP-27 (CMMP), legumain, cathepsin B, cathepsin C, cathepsin K, cathepsin L, cathepsin S, cathespin X, cathepsin D, cathepsin E, secretase, urokinase (uPA), tissue-type plasminogen activator (tPA), plasmin, thrombin, prostate-specific antigen (PSA, KLK3), human neutrophil elastase (HNE), elastase, tryptase, Type II transmembrane serine proteases (TTSPs), DESC1, hepsin (HPN), matriptase, natriptase-2, TMPRSS2, TMPRSS3, TMPRSS4 (CAP2), fibroblast activation protein (FAP), kallikrein-related peptidase (KLK family), KLK4, KLK5, KLK6, KLK7, KLK8, KLK10, KLK11, KLK13, and KLK14. In some embodiments, upon performing a conjugation reaction between the drug molecule and the cysteine residues of the CCD of the fusion protein, a heterogeneous population of conjugate products is obtained wherein fully conjugated CCD-drug conjugate product is capable of achieving a peak separation ≥6 wherein: a) the fusion protein comprises a polypeptide having 600 or more cumulative amino acid residues comprising a CCD with between 3 to 9 cysteine residues; b) the heterogeneous conjugate products have a mixture of at least 1, 2, and 3 or more payloads linked to the CCD; and c) the conjugation products are analyzed under reversed-phase HPLC chromatography conditions. In some embodiments, the CCD is a sequence of Table 6 having 3 cysteine residues and the fusion protein has at least 800 cumulative amino acid residues. In some embodiments, the CCD is a sequence of Table 6 having 9 cysteine residues and the fusion protein has at least 800 cumulative amino acid residues. In some embodiments, upon cleavage of the PCM by the target tissue protease, the XTEN is released from the fusion protein, wherein the targeting moiety and the CCD with linked drug or biologically active protein remain joined together as a released targeted composition. In some embodiments, the molecular weight of the released targeted composition has a molecular weight that is at least 4-fold, at least 5-fold, at least 6-fold, at least 7-fold, at least 8-fold, at least 10-fold less compared to the fusion protein that is not cleaved. In some embodiments, the hydrodynamic radius of the released targeted composition is at least 4-fold, at least 5-fold, at least 6-fold, at least 7-fold, at least 8-fold, at least 10-fold less compared to the fusion protein that is not cleaved. In some embodiments, the released targeted composition has a binding affinity that is at least about 2-fold, 3-fold, 4-fold, 5-fold, 6-fold, 7-fold, 8-fold, 9-fold, 10-fold, 20-fold, 30-fold, 40-fold, or 100-fold greater for the target tissue ligand compared to the fusion protein that is not cleaved. In some embodiments, the released targeted composition has a binding affinity constant (K_{d}) for the ligand of less than about 10⁻⁴ M, or less than about 10⁻⁵ M, or less than about 10⁻⁶ M, or less than about 10⁻⁷ M, or less than about 10⁻⁸M, or less than about 10⁻⁹ M, or less than about 10⁻¹⁰ M, or less than about 10⁻¹¹ M, or less than about 10⁻¹² M. In some embodiments, the binding affinity is measured in an in vitro ELISA assay. In some embodiments, the cytotoxicity of the released targeted composition is at least about 2-fold, 3-fold, 4-fold, 5-fold, 6-fold, 7-fold, 8-fold, 9-fold, 10-fold, 20-fold, 30-fold, 40-fold, or 100-fold greater against a target cell bearing the ligand in an in vitro mammalian cell cytotoxicity assay compared to the cytotoxicity of the fusion protein that is not cleaved, wherein cytotoxicity is determined by calculation of IC₅₀. In some embodiments, the released targeted composition inhibits growth of target cells bearing the ligand by at least 20%, or at least 40%, or at least 50% more in an in vitro mammalian cell cytotoxicity assay compared to the inhibition of growth by the fusion protein that is not cleaved when said growth inhibition is determined between 24-72 hours after exposure to the released targeted composition or the fusion protein under comparable conditions. In some embodiments, after administration of a bolus dose of a therapeutically effective amount of the fusion protein to a subject having a targeted tissue bearing the ligand and a colocalized protease capable of cleaving the PCM, the released targeted composition released by the protease is capable of accumulating in the target tissue to a concentration that is at least about 2-fold, 3-fold, 4-fold, 5-fold, 6-fold, 7-fold, 8-fold, 9-fold, 10-fold, 20-fold, 30-fold, 40-fold, or 100-fold greater compared to the fusion protein that is not cleaved. In some embodiments, the targeted tissue is a tumor. In some embodiments, the administration results in a reduction of volume of the tumor of at least 10%, or at least 20%, or at least 30%, or at least 40%, or at least 50% at 7 to 21 days after administration. In some embodiments, the administration results in at least 10%, or at least 20%, or at least 30%, or at least 40%, or at least 50% greater reduction of volume of the tumor at 7-21 days after administration compared to a fusion protein that does not comprise the PCM and is administered at a comparable dose. In some embodiments, the subject is selected from the group consisting of mouse, rat, rabbit, monkey, and human.

[0012] In one aspect, the present disclosure provides a targeted conjugate composition. In some embodiments, the targeted conjugate composition is selected from the group consisting of the conjugates of Table 5. In some embodiments, the composition is configured from the N-terminus to the C-terminus as: (a) (TM)-(CCD)-(PCM)-(XTEN); or (b) (XTEN)-(PCM)-(CCD)-(TM); wherein a drug molecule is linked to each cysteine residue of the CCD.

[0013] In some embodiments, the targeted conjugate composition comprises (a) a construct of Table 5 comprising an amino acid sequence of the construct, or (b) a variant construct comprising a variant sequence that is at least 90% identical to the amino acid sequence of the construct, wherein the construct has a structure of Formula I:

[chemical structure]

wherein n is an integer equal to the number of cysteine residues of the CCD.

[0014] In some embodiments, the targeted conjugate composition comprises (a) a construct of Table 5 comprising an amino acid sequence of the construct, or (b) a variant construct comprising a variant sequence that is at least 90% identical to the amino acid sequence of the construct wherein the construct has a structure of Formula II:

[chemical structure]

wherein n is an integer equal to the number of cysteine residues of the CCD.

[0015] In some embodiments, the targeted conjugate composition comprises (a) a construct of Table 5 comprising an amino acid sequence of the construct, or (b) a variant construct comprising a variant sequence that is at least 90% identical to the amino acid sequence of the construct wherein the construct has a structure of Formula III:

[chemical structure]

wherein n is an integer equal to the number of cysteine residues of the CCD.

[0016] In some embodiments, the targeted conjugate composition comprises (a) a construct of Table 5 comprising an amino acid sequence of the construct, or (b) a variant construct comprising a variant sequence that is at least 90% identical to the amino acid sequence of the construct wherein the construct has a structure of Formula IV:

[chemical structure]

wherein n is an integer equal to the number of cysteine residues of the CCD.

[0017] In some embodiments, the targeted conjugate composition is configured according to the structure of Formula I:

[chemical structure]

wherein (a) the TM is an scFv comprising a VL and a VH sequence, wherein each VL and VH has at least 90%, or 91%, or 92%, or 93%, or 94%, or 95%, or 96%, or 97%, or 98%, or 99% identity or is identical to a VL and a VH from an antibody selected from the group consisting of the VL and VH sequences set forth in Table 19, and further comprises a linker sequence selected from the group consisting of the sequences set forth in Table 20 wherein the linker is recombinantly fused between the VL and the VH; (b) the CCD is selected from the group consisting of the CCD of Table 6; (c) the XTEN has at least 90%, or 91%, or 92%, or 93%, or 94%, or 95%, or 96%, or 97%, or 98%, or 99% identity or is identical to a sequence set forth in Table 10; and (d) the drug is selected from the group consisting of doxorubicin, nemorubicin, PNU-159682, paclitaxel, docetaxel, auristatin E, auristatin F, dolastatin 10, dolastatin 15, monomethyl auristatin E (MMAE), monomethyl auristatin F (MMAF), monomethyl auristatin D (MMAD), maytansine, mertansine (DM1), maytansinoid DM4, calicheamicin, N-acetyl-calicheamicin, vinblastine, vincristine, vindesine, vinorelbine, camptothecin, topotecan, irinotecan, SN-38, duocarmycin A, duocarmycin B1, duocarmycin B2, duocarmycin C1, duocarmycin C2, duocarmycin D, duocarmycin SA, duocarmycin TM, duocarmycin MB, duocarmycin DM, mitomycin C, rachelmycin, epothilone A, epothilone B, epothilone C, tubulysin B, tubulysin M, pyrrolobenzodiazepine (PBD), bortezomib, hTNF, I1-12, ranpirnase, hTNF, IL-12, ranpirnase, human ribonuclease (RNAse), Bovine pancreatic RNase, pokeweed antiviral protein, Pseudomonas exotoxin A, gelonin, ricin-A, interferon-alpha, interferon-lambda, urease, amatoxin, alpha-amanitin, beta-amanitin, gamma-amanitin, epsilon-amanitin, bouganin, and staphylococcal enterotoxin; wherein n is an integer equal to the number of cysteine residues of the CCD.

[0018] In some embodiments, the targeted conjugate composition is configured according to the structure of Formula II:

[chemical structure]

wherein (a) the TM is an scFv comprising a VL and a VH sequence, wherein each VL and VH has at least 90%, or 91%, or 92%, or 93%, or 94%, or 95%, or 96%, or 97%, or 98%, or 99% identity or is identical to a VL and a VH from an antibody selected from the group consisting of the VL and VH sequences set forth in Table 19, and further comprises a linker sequence selected from the group consisting of the sequences set forth in Table 20 wherein the linker is recombinantly fused between the VL and the VH; (b) the CCD is selected from the group consisting of the CCD of Table 6; (c) the PCM is selected from the group consisting of the sequences set forth in Table 8; (d) the XTEN has at least 90%, or 91%, or 92%, or 93%, or 94%, or 95%, or 96%, or 97%, or 98%, or 99% identity or is identical to a sequence set forth in Table 10; and (e) the drug is selected from the group consisting of doxorubicin, nemorubicin, PNU-159682, paclitaxel, docetaxel, auristatin E, auristatin F, dolastatin 10, dolastatin 15, monomethyl auristatin E (MMAE), monomethyl auristatin F (MMAF), monomethyl auristatin D (MMAD), maytansine, mertansine (DM1), maytansinoid DM4, calicheamicin, N-acetyl-calicheamicin, vinblastine, vincristine, vindesine, vinorelbine, camptothecin, topotecan, irinotecan, SN-38, duocarmycin A, duocarmycin B1, duocarmycin B2, duocarmycin C1, duocarmycin C2, duocarmycin D, duocarmycin SA, duocarmycin TM, duocarmycin MB, duocarmycin DM, mitomycin C, rachelmycin, epothilone A, epothilone B, epothilone C, tubulysin B, tubulysin M, pyrrolobenzodiazepine (PBD), bortezomib, hTNF, I1-12, ranpirnase, hTNF, IL-12, ranpirnase, human ribonuclease (RNAse), Bovine pancreatic RNase, pokeweed antiviral protein, Pseudomonas exotoxin A, gelonin, ricin-A, interferon-alpha, interferon-lambda, urease, amatoxin, alpha-amanitin, beta-amanitin, gamma-amanitin, epsilon-amanitin, bouganin, and staphylococcal enterotoxin; wherein n is an integer equal to the number of cysteine residues of the CCD.

[0019] In some embodiments, the targeted conjugate composition is configured according to the structure of Formula III:

[chemical structure]

wherein (a) the TM is an scFv comprising a VL and a VH sequence, wherein each VL and VH has at least 90%, or 91%, or 92%, or 93%, or 94%, or 95%, or 96%, or 97%, or 98%, or 99% identity or is identical to a VL and a VH from an antibody selected from the group consisting of the VL and VH sequences set forth in Table 19, and further comprises a linker sequence selected from the group consisting of the sequences set forth in Table 20 wherein the linker is recombinantly fused between the VL and the VH; (b) the CCD is selected from the group consisting of the CCD of Table 6; (c) the PCM is selected from the group consisting of the sequences set forth in Table 8; (d) the XTEN has at least 90%, or 91%, or 92%, or 93%, or 94%, or 95%, or 96%, or 97%, or 98%, or 99% identity or is identical to a sequence set forth in Table 10; and (e) the drug is selected from the group consisting of doxorubicin, nemorubicin, PNU-159682, paclitaxel, docetaxel, auristatin E, auristatin F, dolastatin 10, dolastatin 15, monomethyl auristatin E (MMAE), monomethyl auristatin F (MMAF), monomethyl auristatin D (MMAD), maytansine, mertansine (DM1), maytansinoid DM4, calicheamicin, N-acetyl-calicheamicin, vinblastine, vincristine, vindesine, vinorelbine, camptothecin, topotecan, irinotecan, SN-38, duocarmycin A, duocarmycin B1, duocarmycin B2, duocarmycin C1, duocarmycin C2, duocarmycin D, duocarmycin SA, duocarmycin TM, duocarmycin MB, duocarmycin DM, mitomycin C, rachelmycin, epothilone A, epothilone B, epothilone C, tubulysin B, tubulysin M, pyrrolobenzodiazepine (PBD), bortezomib, hTNF, I1-12, ranpirnase, hTNF, IL-12, ranpirnase, human ribonuclease (RNAse), Bovine pancreatic RNase, pokeweed antiviral protein, Pseudomonas exotoxin A, gelonin, ricin-A, interferon-alpha, interferon-lambda, urease, amatoxin, alpha-amanitin, beta-amanitin, gamma-amanitin, epsilon-amanitin, bouganin, and staphylococcal enterotoxin; wherein n is an integer equal to the number of cysteine residues of the CCD.

[0020] In some embodiments, the targeted conjugate composition is configured according to the structure of Formula IV:

[chemical structure]

wherein (a) the TM is an scFv comprising a VL and a VH sequence, wherein each VL and VH has at least 90%, or 91%, or 92%, or 93%, or 94%, or 95%, or 96%, or 97%, or 98%, or 99% identity or is identical to a VL and a VH from an antibody selected from the group consisting of the VL and VH sequences set forth in Table 19, and further comprises a linker sequence selected from the group consisting of the sequences set forth in Table 20 wherein the linker is recombinantly fused between the VL and the VH; (b) the CCD is selected from the group consisting of the CCD of Table 6; (c) the XTEN has at least 90%, or 91%, or 92%, or 93%, or 94%, or 95%, or 96%, or 97%, or 98%, or 99% identity or is identical to a sequence set forth in Table 10; and (d) the drug is selected from the group consisting of doxorubicin, nemorubicin, PNU-159682, paclitaxel, docetaxel, auristatin E, auristatin F, dolastatin 10, dolastatin 15, monomethyl auristatin E (MMAE), monomethyl auristatin F (MMAF), monomethyl auristatin D (MMAD), maytansine, mertansine (DM1), maytansinoid DM4, calicheamicin, N-acetyl-calicheamicin, vinblastine, vincristine, vindesine, vinorelbine, camptothecin, topotecan, irinotecan, SN-38, duocarmycin A, duocarmycin B1, duocarmycin B2, duocarmycin C1, duocarmycin C2, duocarmycin D, duocarmycin SA, duocarmycin TM, duocarmycin MB, duocarmycin DM, mitomycin C, rachelmycin, epothilone A, epothilone B, epothilone C, tubulysin B, tubulysin M, pyrrolobenzodiazepine (PBD), bortezomib, hTNF, I1-12, ranpirnase, hTNF, IL-12, ranpirnase, human ribonuclease (RNAse), Bovine pancreatic RNase, pokeweed antiviral protein, Pseudomonas exotoxin A, gelonin, ricin-A, interferon-alpha, interferon-lambda, urease, amatoxin, alpha-amanitin, beta-amanitin, gamma-amanitin, epsilon-amanitin, bouganin, and staphylococcal enterotoxin; wherein n is an integer equal to the number of cysteine residues of the CCD.

[0021] In some embodiments, the targeted conjugate composition is configured according to the structure of Formula V:

[chemical structure]

wherein (a) the TM1 is a first scFv comprising a VL and a VH sequence, wherein each VL and VH has at least 90%, or 91%, or 92%, or 93%, or 94%, or 95%, or 96%, or 97%, or 98%, or 99% identity or is identical to a VL and a VH from an antibody selected from the group consisting of the VL and VH sequences set forth in Table 19, and further comprises a linker sequence selected from the group consisting of the sequences set forth in Table 20 wherein the linker is recombinantly fused between the VL and the VH; (b) the TM2 is a second scFv, different from the first scFv, wherein the TM2 comprises a VL and a VH sequence, wherein each VL and VH has at least 90%, or 91%, or 92%, or 93%, or 94%, or 95%, or 96%, or 97%, or 98%, or 99% identity or is identical to a VL and a VH from an antibody selected from the group consisting of the VL and VH sequences set forth in Table 19, and further comprises a linker sequence selected from the group consisting of the sequences in Table 20 wherein the linker is recombinantly fused between the VL and the VH; (c) the CCD is selected from the group consisting of the CCD of Table 6; (d) the XTEN has at least 90%, or 91%, or 92%, or 93%, or 94%, or 95%, or 96%, or 97%, or 98%, or 99% identity or is identical to a sequence set forth in Table 10; and (e) the drug is selected from the group consisting of doxorubicin, nemorubicin, PNU-159682, paclitaxel, docetaxel, auristatin E, auristatin F, dolastatin 10, dolastatin 15, monomethyl auristatin E (MMAE), monomethyl auristatin F (MMAF), monomethyl auristatin D (MMAD), maytansine, mertansine (DM1), maytansinoid DM4, calicheamicin, N-acetyl-calicheamicin, vinblastine, vincristine, vindesine, vinorelbine, camptothecin, topotecan, irinotecan, SN-38, duocarmycin A, duocarmycin B1, duocarmycin B2, duocarmycin C1, duocarmycin C2, duocarmycin D, duocarmycin SA, duocarmycin TM, duocarmycin MB, duocarmycin DM, mitomycin C, rachelmycin, epothilone A, epothilone B, epothilone C, tubulysin B, tubulysin M, pyrrolobenzodiazepine (PBD), bortezomib, hTNF, I1-12, ranpirnase, hTNF, IL-12, ranpirnase, human ribonuclease (RNAse), Bovine pancreatic RNase, pokeweed antiviral protein, Pseudomonas exotoxin A, gelonin, ricin-A, interferon-alpha, interferon-lambda, urease, amatoxin, alpha-amanitin, beta-amanitin, gamma-amanitin, epsilon-amanitin, bouganin, and staphylococcal enterotoxin; wherein n is an integer equal to the number of cysteine residues of the CCD.

[0022] In some embodiments, the targeted conjugate composition is configured according to the structure of Formula VI:

[chemical structure]

wherein (a) the TM1 is a first scFv comprising a VL and a VH sequence, wherein each VL and VH has at least 90%, or 91%, or 92%, or 93%, or 94%, or 95%, or 96%, or 97%, or 98%, or 99% identity or is identical to a VL and a VH from an antibody selected from the group consisting of the VL and VH sequences set forth in Table 19, and further comprises a linker sequence selected from the group consisting of the sequences set forth in Table 20 wherein the linker is recombinantly fused between the VL and the VH; (b) the TM2 is a second scFv, different from the first scFv, wherein the TM2 comprises a VL and a VH sequence, wherein each VL and VH has at least 90%, or 91%, or 92%, or 93%, or 94%, or 95%, or 96%, or 97%, or 98%, or 99% identity or is identical to a VL and a VH from an antibody selected from the group consisting of the VL and VH sequences set forth in Table 19, and further comprises a linker sequence selected from the group consisting of the sequences in Table 20 wherein the linker is recombinantly fused between the VL and the VH; (c) the CCD is selected from the group consisting of the CCD of Table 6; (d) the PCM is selected from the group consisting of the PCM of Table 8; (e) the XTEN has at least 90%, or 91%, or 92%, or 93%, or 94%, or 95%, or 96%, or 97%, or 98%, or 99% identity or is identical to a sequence set forth in Table 10; and (f) the drug is selected from the group consisting of doxorubicin, nemorubicin, PNU-159682, paclitaxel, docetaxel, auristatin E, auristatin F, dolastatin 10, dolastatin 15, monomethyl auristatin E (MMAE), monomethyl auristatin F (MMAF), monomethyl auristatin D (MMAD), maytansine, mertansine (DM1), maytansinoid DM4, calicheamicin, N-acetyl-calicheamicin, vinblastine, vincristine, vindesine, vinorelbine, camptothecin, topotecan, irinotecan, SN-38, duocarmycin A, duocarmycin B1, duocarmycin B2, duocarmycin C1, duocarmycin C2, duocarmycin D, duocarmycin SA, duocarmycin TM, duocarmycin MB, duocarmycin DM, mitomycin C, rachelmycin, epothilone A, epothilone B, epothilone C, tubulysin B, tubulysin M, pyrrolobenzodiazepine (PBD), bortezomib, hTNF, I1-12, ranpirnase, hTNF, IL-12, ranpirnase, human ribonuclease (RNAse), Bovine pancreatic RNase, pokeweed antiviral protein, Pseudomonas exotoxin A, gelonin, ricin-A, interferon-alpha, interferon-lambda, urease, amatoxin, alpha-amanitin, beta-amanitin, gamma-amanitin, epsilon-amanitin, bouganin, and staphylococcal enterotoxin; wherein n is an integer equal to the number of cysteine residues of the CCD.

[0023] In some embodiments, the targeted conjugate composition is configured according to the structure of Formula VIII:

[chemical structure]

wherein (a) the TM is a scFv comprising a VL and a VH sequence, wherein each VL and VH has at least 90%, or 91%, or 92%, or 93%, or 94%, or 95%, or 96%, or 97%, or 98%, or 99% identity or is identical to a VL and a VH from an antibody selected from the group consisting of the VL and VH sequences set forth in Table 19, and further comprises a linker sequence selected from the group consisting of the sequences set forth in Table 20 wherein the linker is recombinantly fused between the VL and the VH; (b) the CCD is selected from the group consisting of the CCD of Table 6; (c) the PCM is selected from the group consisting of the PCM of Table 8; (d) the CL is a cross-linker selected from the group consisting of the cross-linkers of Table 25; (e) the XTEN has at least 90%, or 91%, or 92%, or 93%, or 94%, or 95%, or 96%, or 97%, or 98%, or 99% identity or is identical to a sequence set forth in Table 10; and (f) the drug is selected from the group consisting of doxorubicin, nemorubicin, PNU-159682, paclitaxel, docetaxel, auristatin E, auristatin F, dolastatin 10, dolastatin 15, monomethyl auristatin E (MMAE), monomethyl auristatin F (MMAF), monomethyl auristatin D (MMAD), maytansine, mertansine (DM1), maytansinoid DM4, calicheamicin, N-acetyl-calicheamicin, vinblastine, vincristine, vindesine, vinorelbine, camptothecin, topotecan, irinotecan, SN-38, duocarmycin A, duocarmycin B1, duocarmycin B2, duocarmycin C1, duocarmycin C2, duocarmycin D, duocarmycin SA, duocarmycin TM, duocarmycin MB, duocarmycin DM, mitomycin C, rachelmycin, epothilone A, epothilone B, epothilone C, tubulysin B, tubulysin M, pyrrolobenzodiazepine (PBD), bortezomib, hTNF, I1-12, ranpirnase, hTNF, IL-12, ranpirnase, human ribonuclease (RNAse), Bovine pancreatic RNase, pokeweed antiviral protein, Pseudomonas exotoxin A, gelonin, ricin-A, interferon-alpha, interferon-lambda, urease, amatoxin, alpha-amanitin, beta-amanitin, gamma-amanitin, epsilon-amanitin, bouganin, and staphylococcal enterotoxin; wherein n is an integer equal to the number of cysteine residues of the CCD.

[0024] In some embodiments, the targeted conjugate composition is configured according to the structure of Formula X:

[chemical structure]

wherein (a) the TM1 is a first scFv comprising a VL and a VH sequence, wherein each VL and VH has at least 90%, or 91%, or 92%, or 93%, or 94%, or 95%, or 96%, or 97%, or 98%, or 99% identity or is identical to a VL and a VH from an antibody selected from the group consisting of the VL and VH sequences set forth in Table 19, and further comprises a linker sequence selected from the group consisting of the sequences set forth in Table 20 wherein the linker is recombinantly fused between the VL and the VH; (b) the TM2 is a second scFv, different from the first scFv, wherein the TM2 comprises a VL and a VH sequence, wherein each VL and VH has at least 90%, or 91%, or 92%, or 93%, or 94%, or 95%, or 96%, or 97%, or 98%, or 99% identity or is identical to a VL and a VH from an antibody selected from the group consisting of the VL and VH sequences set forth in Table 19, and further comprises a linker sequence selected from the group consisting of the sequences in Table 20 wherein the linker is recombinantly fused between the VL and the VH; (c) the CCD is selected from the group consisting of the CCD of Table 6; (d) the PCM is selected from the group consisting of the PCM of Table 8; (e) the XTEN is a cysteine-engineered XTEN having at least 90%, or 91%, or 92%, or 93%, or 94%, or 95%, or 96%, or 97%, or 98%, or 99% identity or is identical to a sequence set forth in Table 11; (f) the drug is selected from the group consisting of doxorubicin, nemorubicin, PNU-159682, paclitaxel, docetaxel, auristatin E, auristatin F, dolastatin 10, dolastatin 15, monomethyl auristatin E (MMAE), monomethyl auristatin F (MMAF), monomethyl auristatin D (MMAD), maytansine, mertansine (DM1), maytansinoid DM4, calicheamicin, N-acetyl-calicheamicin, vinblastine, vincristine, vindesine, vinorelbine, camptothecin, topotecan, irinotecan, SN-38, duocarmycin A, duocarmycin B1, duocarmycin B2, duocarmycin C1, duocarmycin C2, duocarmycin D, duocarmycin SA, duocarmycin TM, duocarmycin MB, duocarmycin DM, mitomycin C, rachelmycin, epothilone A, epothilone B, epothilone C, tubulysin B, tubulysin M, pyrrolobenzodiazepine (PBD), bortezomib, hTNF, I1-12, ranpirnase, hTNF, IL-12, ranpirnase, human ribonuclease (RNAse), Bovine pancreatic RNase, pokeweed antiviral protein, Pseudomonas exotoxin A, gelonin, ricin-A, interferon-alpha, interferon-lambda, urease, amatoxin, alpha-amanitin, beta-amanitin, gamma-amanitin, epsilon-amanitin, bouganin, and staphylococcal enterotoxin; wherein n is an integer equal to the number of cysteine residues of the CCD; and (g) y is an integer equal to the number of cysteine residues of the XTEN.

[0025] In one aspect, the present disclosure provides a pharmaceutical composition. In some embodiments, the pharmaceutical composition comprises a fusion protein in accordance with any of the various embodiments disclosed herein, including with regard to any of the various aspects of the disclosure. In some embodiments, the pharmaceutical composition comprises a targeted conjugate composition in accordance with any of the various embodiments disclosed herein, including with regard to any of the various aspects of the disclosure. In some embodiments, the pharmaceutical composition is for treatment of a disease in a subject wherein the disease is selected from the group consisting of breast cancer, ER/PR+ breast cancer, Her2+ breast cancer, triple-negative breast cancer, liver carcinoma, lung cancer, non-small cell lung cancer, colorectal cancer, esophageal carcinoma, fibrosarcoma, choriocarcinoma, ovarian cancer, cervical carcinoma, laryngeal carcinoma, endometrial carcinoma, hepatocarcinoma, gastric cancer, prostate cancer, renal cell carcinoma, Kaposi's sarcoma, astrocytoma, melanoma, squamous cell cancer, basal cell carcinoma, head and neck cancer, thyroid carcinoma, Wilm's tumor, urinary tract carcinoma, thecoma, arrhenoblastoma, glioblastomoa, pancreatic cancer, leukemia, acute myeloid leukemia (AML), chronic myeloid leukemia (PCML), acute lymphocytic leukemia (ALL), chronic lymphocytic leukemia (CLL), T-cell acute lymphoblastic leukemia, lymphoblastic disease, multiple myeloma, Hodgkin's lymphoma, non-Hodgkin's lymphoma, acne vulgaris, asthma, autoimmune diseases, autoinflammatory diseases, celiac disease, chronic prostatitis, glomerulonephritis, hypersensitivity reaction, inflammatory bowel disease, Crohn's disease, pelvic inflammatory disease, reperfusion injury, rheumatoid arthritis, sarcoidosis, transplant rejection, vasculitis, psoriasis, fibromyalgia, irritable bowel syndrome, lupus erythematosis, osteoarthritis, scleroderma, and ulcerative colitis. In some embodiments, the pharamaceutical composition is for use in a pharmaceutical regimen for treatment of the subject, said regimen comprising the pharmaceutical composition. In some embodiments, the pharmaceutical regimen further comprises the step of determining the amount of pharmaceutical composition needed to achieve a beneficial effect in the subject having the disease.

[0026] In one aspect, the present disclosure provides a method of treating a disease in a subject. In some embodiments, the method comprises a regimen of administering one, or two, or three, or four or more therapeutically effective doses of a pharmaceutical composition in accordance with any of the various embodiments disclosed herein, including with regard to any of the various aspects of the disclosure. In some embodiments, the disease is selected from the group consisting of breast cancer, ER/PR+ breast cancer, Her2+ breast cancer, triple-negative breast cancer, liver carcinoma, lung cancer, non-small cell lung cancer, colorectal cancer, esophageal carcinoma, fibrosarcoma, choriocarcinoma, ovarian cancer, cervical carcinoma, laryngeal carcinoma, endometrial carcinoma, hepatocarcinoma, gastric cancer, prostate cancer, renal cell carcinoma, Kaposi's sarcoma, astrocytoma, melanoma, squamous cell cancer, basal cell carcinoma, head and neck cancer, thyroid carcinoma, Wilm's tumor, urinary tract carcinoma, thecoma, arrhenoblastoma, glioblastomoa, and pancreatic cancer. In some embodiments, the administered pharmaceutical composition comprises a targeting moiety wherein the targeting moiety has specific binding affinity for a tumor of the disease. In some embodiments, the administered pharmaceutical composition comprises a targeting moiety wherein the targeting moiety has specific binding affinity for a target selected from the group of targets set forth in Table 2, Table 3, Table 4, Table 18, and Table 19. In some embodiments, the administration results in at least a 10%, or 20%, or 30%, or 40%, or 50%, or 60%, or 70%, or 80%, or 90% greater improvement of at least one, two, or three parameters associated with a cancer compared to an untreated subject wherein the parameters are selected from the group consisting of time-to-progression of the cancer, time-to-relapse, time-to-discovery of local recurrence, time-to-discovery of regional metastasis, time-to-discovery of distant metastasis, time-to-onset of symptoms, pain, body weight, hospitalization, time-to-increase in pain medication requirement, time-to-requirement of salvage chemotherapy, time-to-requirement of salvage surgery, time-to-requirement of salvage radiotherapy, time-to-treatment failure, and time of survival. In some embodiments, the administered doses result in a decrease in the tumor size in the subject. In some embodiments, the decrease in tumor size is at least 10%, or at least 20%, or at least 30%, or at least 40%, or at least 50% or greater. In some embodiments, the decrease in tumor size is achieved within at least about 10 days, at least about 14 days, at least about 21 days after administration, or at least about 30 days after administration. In some embodiments, the administered doses result in tumor stasis in the subject. In some embodiments, tumor stasis is achieved within at least about 10 days, at least about 14 days, at least about 21 days after administration, or at least about 30 days after administration. In some embodiments, the regimen comprises administration of the therapeutically effective dose every 7 days, or every 10 days, or every 14 days, or every 21 days, or every 30 days. In some embodiments, the pharmaceutical composition is administered using a therapeutically effective dose regimen in a subject, wherein the therapeutically effective dose regimen results in a growth inhibitory effect on a tumor cell bearing a target selected from the group of targets set forth in Table 2, Table 3, Table 4, Table 18, and Table 19. In some embodiments, the fusion protein or the targeted conjugate composition of the pharmaceutical composition exhibits a terminal half-life that is longer than at least at least about 72 h, or at least about 96 h, or at least about 120 h, or at least about 144 h, or at least about 10 days, or at least about 21 days, or at least about 30 days when administered to a subject.

[0027] In one aspect, the present disclosure provides a method of reducing a frequency of treatment in a subject with a cancer tumor. In some embodiments, the method comprises administering a pharmaceutical composition to the subject using a therapeutically effective dose regimen for the pharmaceutical composition. The pharmaceutical composition can be any pharmaceutical composition in accordance with any of the various embodiments disclosed herein, including with regard to any of the various aspects of the disclosure. In some embodiments, the administration results in a decrease in tumor size in the subject, wherein the decrease in tumor size is at least 10%, or at least 20%, or at least 30%, or at least 40%, or at least 50% or greater. In some embodiments, the regimen resulting in a decrease in cancer tumor size is administration of a therapeutically effective dose of the pharmaceutical composition every 7 days, or every 10 days, or every 14 days, or every 21 days, or every 30 days, or monthly. In some embodiments, the regimen resulting in a decrease in cancer tumor size has dosing intervals in a subject that are 3-fold, or 4-fold, or 5-fold, or 6-fold, or 7-fold, or 8-fold, or 9-fold, or 10-fold greater compared to the therapeutically-effective dose regimen of the corresponding payload drug not linked to the conjugate composition.

[0028] In one aspect, the present disclosure provides a method of treating a cancer cell in vitro. In some embodiments, the method comprises administering to a cell culture of a cancer cell an effective amount of a fusion protein in accordance with any of the various embodiments disclosed herein, including with regard to any of the various aspects of the disclosure, wherein the administration results in a cytotoxic effect to the cancer cell. In some embodiments, the method comprises administering to a cell culture of a cancer cell an effective amount of a targeted conjugate composition in accordance with any of the various embodiments disclosed herein, including with regard to any of the various aspects of the disclosure, wherein the administration results in a cytotoxic effect to the cancer cell. In some embodiments, the cancer cell has a target for which the TM of the conjugate composition has binding affinity. In some embodiments, the target is selected from the group consisting of the targets set forth in Table 2, Table 3, Table 4, Table 18, and Table 19. In some embodiments, the culture comprises a protease capable of cleaving the PCM of the conjugate composition. In some embodiments, the cancer cell is selected from the group consisting of the cell lines of Table 18. In some embodiments, the cytotoxic effect of the conjugate composition is greater compared to that seen using a cancer cell that does not have the ligand for the TM of the conjugate composition.

[0029] In one aspect, the present disclosure provides an isolated nucleic acid. In some embodiments, the isolated nucleic acid comprises (a) a polynucleotide sequence encoding a fusion protein in accordance with any of the various embodiments disclosed herein, including with regard to any of the various aspects of the disclosure, and/or (b) a complement of the polynucleotide according to (a).

[0030] In one aspect, the present disclosure provides an expression vector. In some embodiments, the expression vector comprises a polynucleotide according to any of the various aspects and embodiments disclosed herein, and a recombinant regulatory sequence operably linked to the polynucleotide sequence.

[0031] In one aspect, the present disclosure provides a host cell. In some embodiments, the host cell comprises an expression vector according to any of the various aspects and embodiments disclosed herein. In some embodiments, the host cell is a prokaryote. In some embodiments, the host cell is E. coli.

### INCORPORATION BY REFERENCE

[0032] All publications, patents, and patent applications mentioned in this specification are herein incorporated by reference to the same extent as if each individual publication, patent, or patent application was specifically and individually indicated to be incorporated by reference.

### BRIEF DESCRIPTION OF THE DRAWINGS

[0033] The features and advantages of the invention may be further explained by reference to the following detailed description and accompanying drawings that sets forth illustrative embodiments

[0034] FIG. 1 shows schematics of XTEN suitable for conjugation with payloads. FIG. 1A shows unmodified XTEN of different length. FIG. 1B shows a cysteine-engineered XTEN with an internal cysteine with a thiol side chain; below is an XTEN with a reactive N-terminal amino group; below is an XTEN with an N-terminal cysteine with a thiol reactive group. FIG. 1C shows cysteine-engineered XTEN with multiple internal cysteines (left) and lysine-engineered XTEN with multiple reactive amino-groups (right). FIG. 1D shows three variations of XTEN with engineered thiol and amino groups.

[0035] FIG. 2 shows a conjugation reaction utilizing NHS-esters and their water soluble analogs sulfo-NHS-esters) reacting with a primary amino group to yield a stable amide XTEN-payload product.

[0036] FIG. 3 shows various conjugation reactions. FIG. 3A shows a conjugation reaction utilizing thiol groups and an N-maleimide. The maleimide group reacts specifically with sulfhydryl groups when the pH of the reaction mixture is between pH 6.5 and 7.5, forming a stable thioether linkage that is not reversible. FIG. 3B shows a conjugation reaction utilizing haloacetyls. The most commonly used haloacetyl reagents contain an iodoacetyl group that reacts with sulfhydryl groups at physiological pH. The reaction of the iodoacetyl group with a sulfhydryl proceeds by nucleophilic substitution of iodine with a thiol producing a stable thioether linkage in the XTEN-payload. FIG. 3C shows a conjugation reaction utilizing pyridyl disulfides. Pyridyl disulfides react with sulfhydryl groups over a broad pH range (the optimal pH is 4-5) to form disulfide bonds linking XTEN to payloads.

[0037] FIG. 4 (in FIG. 4A and FIG. 4B) shows a conjugation reaction utilizing zero-length cross-linkers wherein the cross-linkers are used to directly conjugate carboxyl functional groups of one molecule (such as a payload) to the primary amine of another molecule (such as an XTEN).

[0038] FIG. 5 shows a click conjugation reaction utilizing the Huisgen 1,3-dipolar cycloaddition of alkynes to azides to form 1,4-disubsituted-1,2,3-triazoles, as shown.

[0039] FIG. 6 shows a conjugation reaction using thio-ene based chemistry that may proceed by free radical reaction, termed thiol-ene reaction, or anionic reaction, termed thiol Michael addition.

[0040] FIG. 7 shows a conjugation reaction utilizing chemistry based on reactions between hydrazides and aldehydes, resulting in the illustrated hydrazone linkage in the XTEN-payload.

[0041] FIG. 8 shows conjugation reactions utilizing enzymatic ligation. FIG. 8A: Transglutaminases are enzymes that catalyze the formation of an isopeptide bond between the γ-carboxamide group of glutamine of a payload peptide or protein and the ε-amino group of a lysine in a lysine-engineered XTEN (or an N-terminal amino group), thereby creating inter- or intramolecular cross-links between the XTEN and payload. FIG. 8B shows enzymatically-created XTEN-payload compositions utilizing the sortase A transpeptidase enzyme from Staphylococcus aureus to catalyze the cleavage of a short 5-amino acid recognition sequence LPXTG (SEQ ID NO: 3) between the threonine and glycine residues of Proteinl that subsequently transfers the acyl-fragment to an N-terminal oligoglycine nucleophile of Proteinl. By functionalizing the Protein2 to contain an oligoglycine, the enzymatic conjugation of the two proteins is accomplished in a site-specific fashion to result in the desired XTEN-payload composition. Figure discloses SEQ ID NOS 768-769, respectively, in order of appearance.

[0042] FIG. 9 shows various XTEN-cross-linker precursor segments that are used as reactants to link to targeting moieties, payloads or to other XTEN reactants. FIG. 9A is intended to show that the 1B represents the remaining reactive group of the precursors on the right. FIG. 9B shows similar reactive precursors with either multiple (left) or single (right) payload A molecules conjugated to the XTEN.

[0043] FIG. 10 shows exemplary permutations of XTEN-cross-linker precursor segments with two reactive groups of cross-linkers or reactive groups of an incorporated amino acid that are used as reactants to link to payloads or to other XTEN reactants. The 1B and 2B represent reactive groups that will, in other figures, react with a like-numbered reactive group; 1 with 1 and 2 with 2, etc.

[0044] FIG. 11 is intended to show examples of various reactants and the nomenclature for configurations illustrated elsewhere in the Drawings. FIG. 11A shows various forms of reactive XTEN segment precursors, each with a different reactive group on the N-terminus. FIG. 11B shows various cross-linkers with 2, 3 or 4 reactive groups. In the first case, the divalent cross-linker is a heterofunctional linker that reacts with two different types of reactive groups, represented by “2” and “1”. The remaining three represent divalent, trivalent, and tetravalent cross-linkers of the same reactive group. FIG. 11C illustrates the nomenclature of the reaction products of two XTEN segment precursors. In the top version, a 1A was reacted with a 1B to create a dimeric XTEN linked at the N-termini, with the residue of the cross-linker indicated by 1AR-1BR, while the bottom version is also a dimeric XTEN linked at the N-termini, with the residue of the cross-linker indicated by 2AR-2BR. However, the same approach can also be used to conjugate targeting moieties to XTEN or CCD or to conjugate payload drugs to CCD.

[0045] FIG. 12 illustrates the creation of various XTEN precursor segments. FIG. 12A shows the steps of making an XTEN polypeptide, followed by reaction of the N-terminus with the cross-linker with 2B-1A cross-linker, with the 1A reacting with the N-terminal 1B (e.g., an alpha amino acid) to create the XTEN precursor 2 with the reactive group 2B. FIG. 12B shows the sequential addition of two cross-linkers with 2A reactive groups to 2B reactive groups of the XTEN, resulting in XTEN precursor 4, which is then reacted with a cross-linker at the N-terminus between a reactive 1B and the 1A of a cross-linker, resulting in XTEN precursor 5, with reactive groups 4B and 3B. In such case, the XTEN-precursors 5 then could serve as a backbone reactant to conjugate with two targeted conjugate fusion proteins to 3B and a targeting moiety to 4B.

[0046] FIG. 13 illustrates various configurations of bispecific conjugates with two payloads. FIG. 13A illustrates configurations with one molecule each of two payloads, while FIG. 13B illustrates various configurations with multiple copies of one or both payloads.

[0047] FIG. 14 shows examples of conjugates comprising a targeting moiety, XTEN, and a CCD with linked payloads. Targeting moieties can be peptides, peptoids, or receptor ligands. FIG. 14A shows a single fusion protein of a CCD-XTEN conjugated to the targeting moiety. The CCD has 3 payloads conjugated to the cysteine residues. FIG. 14B shows a conjugate of a TM conjugated to the terminus of two CCD-XTEN fusion proteins (which could include PCM-TM-CCD-drug payloads) in which the payloads are conjugated to cysteine residues of the CCD.

[0048] FIG. 15 shows an example of the creation of a combinatorial CCD-PCM-XTEN conjugate library. Payloads A, B, C are conjugated to CCD-PCM-XTEN carrying reactive group 1A, resulting in one set of CCD-PCM-XTEN-precursor segments. Payloads E, F, and G are conjugated to CCD-PCM-XTEN carrying reactive group 1B, resulting in a second set of CCD-PCM-XTEN-precursor segments. These segments are subjected to combinatorial conjugation and then are purified from reactants. This enables the formation of combinatorial products that can be immediately subjected to in vitro and in vivo testing. In this case, reactive groups 1A and 1B are the alpha-amino groups of XTEN with or without a bispecific cross-linker. In one example, the 1A is an azide and 1B is an alkyne or vice versa, while the payloads are attached to XTEN via thiol groups in XTEN. The PCM domain is optional in the CCD-PCM-XTEN molecules shown.

[0049] FIG. 16 shows an example of the creation of a combinatorial CCD-PCM-XTEN conjugate library that optimizes the ratio between two payloads. Each library member carries a different ratio of payload A and payload E. The PCM domain is optional in the CCD-PCM-XTEN molecules shown. After testing, the desireable candidates incorporated into targeted conjugate compositions.

[0050] FIG. 17 shows an example of the creation of a combinatorial CCD-PCM-XTEN conjugate library that creates combinations of targeting moieties and payloads. The targeting moieties are conjugated to CCD-PCM-XTEN carrying reactive group 1A. Payloads E, F, and G are conjugated to CCD-PCM-XTEN carrying reactive group 1B. These segments are subjected to combinatorial conjugation, enabling the formation of combinatorial products where each library member comprises targeting moieties and payloads. All CCD-PCM-XTEN segments carrying payloads and conjugation groups can be purified as combinatorial products that can be immediately subjected to in vitro and in vivo testing. The PCM domain is optional in the CCD-PCM-XTEN molecules shown. After testing, the desireable candidates are incorporated into targeted conjugate compositions.

[0051] FIG. 18 shows schematic examples of targeted conjugate compositions interacting with a target cell. FIG. 18A shows an example in which the XTEN remains fused to the CCD and targeting moiety as a fusion protein and binds to to the target receptor that is over-expressed on many cancer cells. Receptor binding results in internalization followed by proteolytic breakdown and the intracellular liberation of Payload A, which is toxic to the cell. FIG. 18B shows a construct design in which the XTEN has been released by cleavage of the PCM and the resulting fragment comprising the targeting moiety and the CCD with linked payloads binds to the target receptor that is over-expressed on many cancer cells. Receptor binding results in internalization followed by proteolytic break down and the intracellular liberation of Payload A, which is toxic to the cell.

[0052] FIG. 19 shows the complete purification process of a CCD-XTEN construct, as described in Example 7. FIG. 19A shows a SDS-PAGE analysis of fraction of CCD-XTEN after cation exchange capture step. The materials per lane are: Lane 1: Marker; Lane 2: Cation exchange column load; Lane 3-5: Cation exchange column flow through/wash fractions 1-3; Lane 6: Cation exchange column elution; Lane 7: Cation exchange strip. FIG. 19B shows SDS-PAGE analysis of anion exchange polishing step fractions. The materials per lane are: Lane 1: Marker; Lane 2: Anion exchange column load (post trypsin digestion); Lane 3: Anion exchange column flow through; Lane 4-12: Anion exchange column elution fractions E1-E9.

[0053] FIG. 20 shows the complete purification process of a CCD-PCM-XTEN construct, as described in Example 8. FIG. 20A shows a SDS-PAGE analysis of fraction of CCD-PCM-XTEN after cation exchange capture step. The materials per lane are: Lane 1: Marker; Lane 2: Cation exchange column load; Lane 3-5: Cation exchange column flow through/wash fractions 1-3; Lane 6: Cation exchange elution; Lane 7: Cation exchange column strip. FIG. 20B shows SDS-PAGE analysis of anion exchange polishing step fractions. The materials per lane are: Lane 1: Marker; Lane 2: Anion exchange column load (post trypsin digestion); Lane 3: Anion exchange column flow through; Lane 4-17: Anion exchange column elution fractions E1-E14; Lane 18: Marker; Lane 19: Anion exchange column load (post trypsin digestion); Lane 20-33: Anion exchange column elution fractions E15-E24; Lane 34: anion exchange column strip.

[0054] FIG. 21 depicts results from the experiments to synthesize 3x-MMAE-CCD-XTEN and 3x-MMAE-CCD-PCM-XTEN. FIG. 21A is an analytical C4 RP-HPLC trace of 3x-MMAE-CCD-XTEN demonstrating >95% purity, as described in Example 11. FIG. 21B is an analytical C4 RP-HPLC trace of 3x-MMAE-CCD-PCM-XTEN demonstrating >95% purity, as described in Example 12.

[0055] FIG. 22 depicts results from the experiments to synthesize MCC-3x-MMAE-CCD-XTEN, as described in Example 15. FIG. 22A is an analytical C4 RP-HPLC trace of MCC-3x-MMAE-CCD-XTEN demonstrating >95% purity. FIG. 22B is a non-reducing SDS polyacrylamide gel with molecular weight markers (lane 1), MCC-3x-MMAE-CCD-XTEN (lane 2), and maleimide reactivity assessment of MCC-3x-MMAE-CCD-XTEN reaction with Cys-XTEN (lane 3).

[0056] FIG. 23 depicts results from the experiments to synthesize an aHER2-targeted CCD-XTEN-drug conjugate, as described in Example 18. FIG. 23A is a non-reducing SDS polyacrylamide gel with molecular weight markers (lane 1) and purified aHER2-targeted CCD-XTEN-drug conjugate from reaction of aHER2-XTEN and MCC-3x-MMAE-CCD-XTEN (lane 2). FIG. 23B is ESI-MS data demonstrating purity and intact mass of aHER2-targeted CCD-XTEN-drug conjugate. FIG. 23C is analytical SEC-HPLC data demonstrating monomeric purity of aHER2-targeted CCD-XTEN-drug conjugate.

[0057] FIG. 24 depicts results from the experiments to synthesize an aHER2-targeted CCD-XTEN-drug conjugate with PCM, as described in Example 19. FIG. 24A is a non-reducing SDS polyacrylamide gel with molecular weight markers (lane 1) and purified aHER2-targeted CCD-XTEN-drug conjugate with PCM from reaction of aHER2-XTEN and MCC-3x-MMAE-CCD-PCM-XTEN (lane 2). FIG. 24B is ESI-MS data demonstrating purity and intact mass of aHER2-targeted CCD-XTEN-drug conjugate. FIG. 24C is analytical SEC-HPLC data demonstrating monomeric purity of aHER2-targeted CCD-XTEN-drug conjugate with PCM.

[0058] FIG. 25 depicts results from the experiments to synthesize aHER2-targeted XTEN-3x-DM1 conjugate, as described in Example 16. FIG. 25A is a non-reducing SDS polyacrylamide gel with molecular weight markers (lane 1) and purified aHER2-targeted XTEN-3xDM1 conjugate (lane 2). FIG. 25B is ESI-MS data demonstrating purity and intact mass of aHER2-targeted XTEN-3xDM1. FIG. 25C is analytical SEC-HPLC data demonstrating monomeric purity of aHER2-targeted XTEN-3xDM1.

[0059] FIG. 26 shows an SDS-PAGE gels of samples from a stability study of XTEN_AE864. The XTEN_AE864 was incubated in rat plasma (FIG. 26A), rat kidney homogenate (FIG. 26B, left), and PBS buffer (FIG. 26B, right) for up to 7 days at 37° C., as described in Example 29. Samples were withdrawn at 0 hours, 4 hours, 24 hours, 7 days, and XTEN were extracted by methanol precipitation and analyzed by SDS-PAGE followed by staining with Stains-all. The location of the full-length XTEN864 is shown by the arrow.

[0060] FIG. 27 shows the near UV circular dichroism spectrum of Ex4-XTEN_AE864, performed as described in Example 30.

[0061] FIG. 28 is a schematic of the logic flow chart of the algorithm BlockScore (Example 32). In the figure the following legend applies: i, j—counters used in the control loops that run through the entire sequence; HitCount—this variable is a counter that keeps track of how many times a subsequence encounters an identical subsequence in a block; SubSeqX—this variable holds the subsequence that is being checked for redundancy; Sub SeqY—this variable holds the subsequence that the SubSeqX is checked against; BlockLen—this variable holds the user determined length of the block; SegLen—this variable holds the length of a segment. The program is hardcoded to generate scores for subsequences of lengths 3, 4, 5, 6, 7, 8, 9, and 10; Block—this variable holds a string of length BlockLen. The string is composed of letters from an input XTEN sequence and is determined by the position of the i counter; SubSeqList—this is a list that holds all of the generated subsequence scores.

[0062] FIG. 29 depicts results from the experiments to synthesize aHER2-targeted XTEN-3x-MMAE conjugate, as described in Example 17. FIG. 29A is a non-reducing SDS polyacrylamide gel with molecular weight markers (lane 1) and purified aHER2-targeted XTEN-3xMMAE conjugate (lane 2). FIG. 29B is ESI-MS data demonstrating purity and intact mass of aHER2-targeted XTEN-3xMMAE.

[0063] FIG. 30 depicts results from the experiments to synthesize folate-targeted CCD-XTEN-drug conjugate, as described in Example 20. FIG. 30A is an analytical C4 RP-HPLC trace of purified folate-targeted CCD-XTEN-drug conjugate from reaction of folate-AHHAC and MCC-3x-MMAE-CCD-XTEN. FIG. 30B is a non-reducing SDS polyacrylamide gel with molecular weight markers (lane 1) and purified folate-targeted CCD-XTEN-drug conjugate (lane 2).

[0064] FIG. 31 depicts results from the experiments to synthesize folate-targeted CCD-XTEN-drug conjugate with PCM, as described in Example 21. FIG. 31A is an analytical C4 RP-HPLC trace of purified folate-targeted CCD-XTEN-drug conjugate with PCM from reaction of folate-AHHAC and MCC-3x-MMAE-CCD-PCM-XTEN. FIG. 31B is a non-reducing SDS polyacrylamide gel with molecular weight markers (lane 1) and purified folate-targeted CCD-XTEN-drug conjugate with PCM (lane 2).

[0065] FIG. 32 depicts analytical C4 RP-HPLC result from the experiments to synthesize 3x-MMAE-XTEN, as described in Example 10.

[0066] FIG. 33 depicts results from the experiments to synthesize 3x-MMAE-CCD-XTEN, as described in Example 11, and 3x-MMAE-XTEN, as described in Example 10. FIG. 33A shows a scheme for the conjugation of drug payload to CCD-XTEN or cysteine-engineered XTEN. FIG. 33B depicts the analytical C4 RP-HPLC traces for drug conjugation to CCD-XTEN or cysteine-engineered XTEN.

[0067] FIG. 34 depicts different formats of Targeting Moiety-CCD-PCM-XTEN-Payload conjugates in which the PCM domain is optional. The attached XTEN helps to extend systemic half-life to the composition after administration to a subject. When the composition is in the tumor microenvironment, over-expressed proteases of the tumor cleave the PCM (if present), releasing the terminal XTEN, resulting in better penetration of the smaller remaining segment carrying targeting moiety fused to the CCD with linked Payload. FIG. 34A shows one or multiple Payload A molecules attached to the CCD that will remain together with the Targeting Moiety (TM1) after proteolytic cleavage at the PCM, releasing the XTEN from the composition. FIG. 34B shows one or multiple Payload A molecules attached to the CCD that will remain together with the Targeting Moiety (TM1) and XTEN, with no proteolytic cleavage of the XTEN away from the composition. FIG. 34C shows varying number of XTENs attached to PCM by multivalent cross-linkers capable of being released upon cleavage of the PCM, resulting in better penetration of the smaller N-terminal segment carrying the targeting moiety and the CCD with the linked Payloads. FIG. 34D shows that the length of XTENs released after cleavage of PCM can be varied in the targeted conjugate compositions, for purposes of adjusting pharmacokinetics, tumor penetration, and shielding of the payloads and targeting moieties, the latter property also illustrated in FIG. 35.

[0068] FIG. 35 illustrates different formats of the targeted conjugate composition contructs in which the Targeting Moiety (TM1) is shielded by protease-releasable XTEN(s) and/or steric hindrance of the compound configuration. In these exemplary configurations, TM1 is only exposed upon PCM cleavage in the tumor microenvironment and becomes accessible to its ligand. Conversely, normal tissues with high expression of the cancer target but otherwise lacking or having low expression of protease will be spared due to lack of protease over-expression seen in the tumor microenvironment. FIG. 35A shows a construct design linked to a single protease-cleavable XTEN. FIG. 35B shows a construct design linked to multiple protease-cleavable XTENs to achieve a better shielding effect.

[0069] FIG. 36 illustrates the chemical structure and sequences of a folate-targeted XTEN-conjugate with a folate targeting moiety conjugated to a CCD-XTEN (SEQ ID NO: 770) (FIG. 36A) or a folate targeting moiety conjugated to a CCD-PCM-XTEN (FIG. 36B) in which molecules of MMAE (SEQ ID NO: 771) (FIG. 36C) are conjugated to the Z modified cysteine residues of the CCD.

[0070] FIG. 37 shows the conjugation of multiple copies of PCM-TM1-CCD-Payload-PCM-XTEN2 construct or multiple copies of a PCM-TM1-CCD-Payload construct onto one single backbone XTEN. FIG. 37A shows XTEN1 containing three reactive groups (IB) FIG. 37B shows a fusion protein containing a reactive group (1A) on a PCM sequence fused to a targeting moiety (TM1) fused to a CCD segment carrying three copies of Payload A and an XTEN2; FIG. 37C shows a fusion protein containing a reactive group (1A) on a PCM sequence fused to a targeting moiety (TM1) fused to a CCD segment carrying three copies of Payload A. FIG. 37D shows the reaction product of the final conjugate of FIG. 37A and 37B with one XTEN backbone sequence carrying multiple copies of protease-releasable TM1-CCD-3x_Payload A-XTEN2 conjugate while FIG. 37E shows the reaction product of the final conjugate of FIG. 37A and 37C with one XTEN backbone sequence carrying multiple copies of protease-releasable TM1-CCD-3x_Payload A conjugate. The TM1 of the final conjugates are shielded but the construct is likely to infiltrate tumor tissue more than normal tissue due to the enhanced permeability and retention (EPR) effect imparted by the XTEN.

[0071] FIG. 38 shows a schematic example the cleavage, binding, and processing of an targeted conjugate composition comprising fusion proteins of targeting moieties fused to CCD and linked toxin payloads conjugated to an XTEN backbone by a protease cleavage moiety (PCM) that has a sequence capable of being cleaved by a protease in the microenvironment of the target cell, such as a tumor cell. When the conjugate is in the microenviroment of a tumor overexpressing protease capable of cleaving the PCM, the component of the cleaved conjugate with the TM1 (fused to CCD with linked cytotoxic Payload A) binds to the target receptor that is over-expressed on the cancer cell. Receptor binding results in internalization of the bound fusion protein conjugate followed by proteolytic break down and the intracellular liberation of Payload A, which is toxic to the cell.

[0072] FIG. 39 shows the conjugation of multiple copies of either reactive PCM-TM1-CCD-Payload-XTEN2 (FIG. 39B) or reactive PCM-TM1-CCD-Payload (FIG. 39C) molecules onto one single backbone XTEN. FIG. 39A depicts the backbone XTEN containing three reactive groups (IB), as well as a targeting moiety (TM2), which serves to bring the drug in the proximity of tumor tissue. FIG. 39D depicts the final conjugate construct with one TM2-targeted molecule carrying, in this case, three copies of protease-releasable TM1-CCD-3x_Payload A-XTEN2 conjugates. FIG. 39E depicts the final conjugate construct with one TM2-targeted molecule carrying, in this case, three copies of protease-releasable TM1-CCD-3x_Payload A conjugates.

[0073] FIG. 40 shows a schematic example of the cleavage, binding, and processing of a conjugate of FIG. 39, comprising targeting moieties and toxin payloads linked to a backbone XTEN by a protease cleavage moiety (PCM) that exerts selective action on a target cell, such as a tumor cell. In this case, a second targeting domain (TM2) on the XTEN backbone serves to bring the entire molecule to the proximity of tumor but does not internalize. This allows sufficient residence time in the tumor micro-environment for the tumor-expressed protease to act on the PCM, thus releasing and “activating” the TM1-CCD-Payload_A conjuate by the release from the shielding effect of the intact composition.

[0074] FIG. 41 shows a schematic of a mechanism of action for reducing and then restoring the potency of an active moiety in an XTEN-conjugate in a selective fashion. In blood and other normal, healthy tissues lacking (or with reduced) protease activity, the XTEN-conjugate of FIG. 41A remains mostly intact, maintaining long serum half-life and low affinity for normal tissue having receptors for the active moiety. In inflamed tissue, where protease levels are elevated, the protease would cleave the PCM (FIG. 41B), liberating the payload in the proximity of the inflammed tissue, thereby regaining potency and the ability to exert its pharmacologic action.

[0075] FIG. 42 shows the conjugation of one parental XTEN backbone (FIG. 42A) carrying multiple copies of protease-releasable active moiety (FIG. 42B) or active moiety-XTEN2 fusion proteins (FIG. 42C). In both cases, active moieties are blocked until over-expressed proteases in inflamed tissue liberate them, as described for FIG. 41.

[0076] FIG. 43 depicts different formats of protease-activatable antibody fragment. FIG. 43A depicts scFv oriented as a variable heavy chain linked to a variable light chain, or vice versa; FIG. 43B depicts protease-cleavable XTEN of various lengths fused to either or both termini of scFv. The affinity of scFv is impaired due to XTEN fusion and is restored upon protease cleavage in target tissue. FIG. 43C depicts insertion of protease-cleavable XTEN into non-essential CDRs, such as CDR2 and CDR3 of the variable light chain The inserted XTEN segment does not affect overall folding of the scFv but offers a shielding effect to other CDRs and thus impedes scFv-XTEN fusion binding to its target until protease cleavage. FIG. 43D depicts various permutations of terminus-fusion and CDR insertions of protease-cleavable XTEN to scFv.

[0077] FIG. 44 shows the results of an assay to determine the action of an MMP-9 enzyme on a peptidyl cleavage moiety. 10 μM of XTEN864-His with the PLGLAG cleavage site (SEQ ID NO: 4) was incubated with 0.1 ng/μL of MMP-9 in 20 uL reactions. Reactions were incubated at 37° C. for up to one hour, with aliquots collected at 10 minute intervals by stopping digestion with the addition of EDTA to 20 mM. Analysis of the samples to determine percentage of cleaved product was performed by C18 RP-HPLC (FIG. 44A). Two negative controls were also included in the assay: one to confirm that digestion did not occur in the absence of MMP-9, and one to confirm that digestion did not occur in the presence of APMA alone, the chemical utilized in zymogen activation (FIG. 44B).

[0078] FIG. 45 shows the results of the proteolytic cleavage assay of an XTEN comprising a proteolytic cleavage moiety BSRS-1, as described in Example 9. FIG. 45A is the results from an SDS-PAGE assay of BSRS1-XTEN digested with MTSP-1, uPA, MMP-2, MMP-7 where the digested products run at a smaller apparent molecular weight compared to the uncleaved starting material. FIG. 45B shows results of an RPC18 HPLC analysis of the pre- and post-digestion samples, with a clear shift in retention time.

[0079] FIG. 46 depicts configurations of conjugate compositions wherein the TM1 is linked to the composition either recombinantly or is conjugated to the fusion protein. FIG. 46A depicts the configuration of a conjugate composition comprising a fusion protein comprising an XTEN, a peptidyl cleavage moiety (PCM), a CCD, and the TM1 at the N-terminus, wherein the TM1, the CCD, the PCM and the XTEN are all linked as a recombinant polypeptide, and the three identical molecules of thePayload A are conjugated to the fusion protein at cysteine residues of the CCD. FIG. 46B depicts a composition that has the same components as FIG. 46A, but the N- to C-terminus orientation of the components is reversed. FIG. 46C depicts the configuration of a conjugate composition comprising a fusion protein comprising an XTEN, a peptidyl cleavage moiety (PCM), a CCD, and the TM1 is conjugated to the N-terminus of the CCD-PCM-XTEN fusion protein (the arrow indicates the site of conjugation).

[0080] FIG. 47 depicts configurations of conjugate compositions wherein the TM1 is linked to the composition either recombinantly or is conjugated to the fusion protein. FIG. 47A depicts the configuration of a conjugate composition comprising an XTENconjugated to a fusion protein of a peptidyl cleavage moiety (PCM), a targeting moiety (TM1), and a CCD. Three molecules of Payload A are conjugated to the fusion protein at cysteine residues of the CCD. FIG. 47B depicts the configuration of a conjugate composition comprising an XTEN selected from the group consisting of the sequences of Table 10 conjugated to a peptidyl cleavage moiety (PCM), wherein the PCM sequence is selected from the group consisting of the PCM sequences of Table 7 linked to a targeting moiety (TM1), which is conjugated to a CCD. Three molecules of Payload A are conjugated to the cysteine residues of the CCD. The arrows indicate the sites of conjugation.

[0081] FIG. 48 depicts configurations of targeted conjugate compositions wherein the TM1 is linked to the composition either recombinantly or is conjugated to the fusion protein. FIG. 48A depicts the configuration of a conjugate composition comprising two identical molecules of an XTEN linked to a trimeric cross-linker, a fusion protein comprising i) a peptidyl cleavage moiety (PCM); ii) a targeting moiety (TM1) that is recombinantly linked between the PCM and the CCD; and iii) a CCD with three molecules of a Payload A conjugated to the fusion protein at cysteine residues of the CCD. The arrows indicate the sites of conjugation. FIG. 48B depicts the same general configuration as FIG. 48A but the TM1 is recombinantly linked to the PCM and is conjugated to the CCD.

[0082] FIG. 49 depicts configurations of targeted conjugate compositions wherein the TM1 is linked to the composition either recombinantly or is conjugated to the fusion protein. FIG. 49A depicts the configuration of a conjugate composition comprising an XTEN backbone; three identical molecules of a fusion protein comprising i) a peptidyl cleavage moiety (PCM); ii) a targeting moiety (TM1) that is recombinantly linked to the PCM and the CCD in each of the three fusion proteins; iii) a CCD; and nine molecules of Payload A wherein three molecules each Payload A are conjugated to each of the three fusion proteins at cysteine residues of the CCD. The arrows indicate the sites of conjugation. FIG. 49B depicts the same general configuration as FIG. 49A but the TM1 is recombinantly linked to the PCM and is conjugated to the CCD bearing the Payload A molecules.

[0083] FIG. 50 depicts configurations of targeted conjugate compositions. FIG. 50A depicts the configuration of a conjugate composition comprising (a) a first fusion protein comprising a backbone XTEN and a targeting moiety (TM2) that is recombinantly linked to the PCM and the CCD bearing the three Payload A molecules; (b) three identical molecules of a fusion protein conjugated to cysteine residues of the XTEN comprising i) a peptidyl cleavage moiety (PCM); ii) a targeting moiety (TM1) wherein the TM1 binds a different target than the TM2; iii) a CCD; and (c) nine molecules of Payload A wherein three molecules each Payload A are conjugated to each of the three fusion proteins at cysteine residues of the CCD. The arrows indicate the sites of conjugation. FIG. 50B depicts the same general configuration as FIG. 50A but the TM1 is recombinantly linked to the PCM and is conjugated to the CCD bearing the Payload A molecules.

[0084] FIG. 51 depicts the configuration of a conjugate composition comprising an immunoglobulin molecule and two molecules of a cleavable conjugate composition comprising a fusion protein comprising i) an XTEN; ii) a peptidyl cleavage moiety (PCM); iii) a CCD; and iv) three identical molecules of Payload A wherein the three molecules each Payload A are conjugated to each of the fusion proteins at cysteine residues of the CCD. The arrows indicate the sites of conjugation of the fusion protein to the immunoglobulin.

[0085] FIG. 52 depicts the conjugate compositions of FIG. 46 reacted with a protease capable of cleaving the PCM (indicated by the scissors) and the resulting reaction products. FIG. 52A (a recombinant attachment of the TM1) and FIG. 52B (a conjugate attachment of the TM1) both depict the location of the cleavage at the PCM and the release of the bulky XTEN from the remainder of the composition, with the remainder, which is of greatly reduced molecular size and is freed from the shielding effect of the XTEN, able to bind to and deliver the payload drugs to the target tissue.

[0086] FIG. 53 depicts depicts the conjugate compositions of FIG. 47 reacted with a protease capable of cleaving the PCM (indicated by the scissors) and the reaction products. FIG. 53A (a recombinant attachment of the TM1) and FIG. 53B (a conjugate attachment of the TM1) both depict the location of the cleavage at the PCM and the release of the bulky XTEN from the remainder of the composition, with the remainder, which is of greatly reduced molecular size and is freed from the shielding effect of the XTEN, able to bind to and deliver the payload drugs to the target tissue.

[0087] FIG. 54 depicts depicts the conjugate compositions of FIG. 48 reacted with a protease capable of cleaving the PCM (indicated by the scissors) and the resulting reaction products. FIG. 54A (a recombinant attachment of the TM1) and FIG. 54B (a conjugate attachment of the TM1) both depict the location of the cleavage at the PCM and the release of the bulky XTEN from the remainder of the composition, with the remainder, which is of greatly reduced molecular size and is freed from the shielding effect of the XTEN, able to bind to and deliver the payload drugs to the target tissue.

[0088] FIG. 55 depicts depicts the conjugate compositions of FIG. 49 reacted with a protease capable of cleaving the PCM (indicated by the scissors) and the resulting reaction products. FIG. 55A (a recombinant attachment of the TM1) and FIG. 55B (a conjugate attachment of the TM1) both depict the location of the cleavage at the PCM and the release of the bulky dimer of two molecules of XTEN (linked to each other) from the remainder of the composition, with the remainder, which is of greatly reduced molecular size and is freed from the shielding effect of the XTEN, able to bind to and deliver the payload drugs to the target tissue.

[0089] FIG. 56 depicts the conjugate compositions of FIG. 50 reacted with a protease capable of cleaving the PCM (indicated by the scissors) and the resulting reaction products. FIG. 56A (a recombinant attachment of the TM1) and FIG. 56B (a conjugate attachment of the TM1) both depict the location of the cleavage at the PCM and the release of the bulky XTEN from the remainder of the composition, with the remainder, the three molecules of a TM1 linked to a CCD with 3 molecules of payload drug linked to each CCD, able to bind to and deliver the payload drugs to the target tissue.

[0090] FIG. 57 depicts the conjugate compositions of FIG. 51 reacted with a protease capable of cleaving the PCM (indicated by the scissors) and the resulting reaction products.

[0091] FIG. 58 depicts results from the experiment to determine the in vitro activity of FA-XTEN432-3xMMAF and XTEN432-3xMMAF in KB cells, as described in Example 35.

[0092] FIG. 59 depicts results from the experiment to determine the in vitro activity of FA-XTEN864-3xMMAF and XTEN864-3xMMAF in KB cells, as described in Example 61.

[0093] FIG. 60 depicts results from the experiment to determine the PK of FA-XTEN432-3xMMAF and XTEN432-3xMMAF in nu/nu mice, as described in Example 36.

[0094] FIG. 61 depicts results from the experiment to determine the MTD of FA-XTEN432-3xMMAF in nu/nu mice, as described in Example 36.

[0095] FIG. 62 depicts results from the experiment to determine the efficacy of FA-XTEN432-3xMMAF and XTEN432-3xMMAF in a KB xenograft mouse model, as described in Example 36.

[0096] FIG. 63 depicts results from the experiment to determine the safety of FA-XTEN432-3xMMAF and XTEN432-3xMMAF in a KB xenograft mouse model, as described in Example 36.

[0097] FIG. 64 depicts results from the experiment to determine the efficacy of FA-XTEN864-3xMMAF and XTEN864-3xMMAF in a KB xenograft mouse model, as described in Example 36.

[0098] FIG. 65 depicts results from the experiment to determine the safety and tolerability of FA-XTEN864-3xMMAF and XTEN864-3xMMAF in a KB xenograft mouse model, as described in Example 36.

[0099] FIG. 66 depicts the configuration of a conjugate cleavable composition comprising an XTEN; three different peptidyl cleavage moieties (PCM1, PCM2, PCM3; collectively represented by BSRS1) integrated into the TM1-XTEN-PCM-CCD fusion protein sequence wherein each PCM sequence is a different sequence; a CCD; and molecules of a targeting moiety (TM1) fused to the XTEN; and three molecules of Payload A wherein the Payload A are conjugated to cysteine residues of the CCD. The figure schematically demonstrates that the composition is capable of being cleaved by three different proteases wherein the cleavage by any one protease results in a different reaction product but all result in the release of the bulky XTEN from the composition.

[0100] FIG. 67 shows the plasma concentrations of the indicated treatment groups of four different constructs dosed at 26 nmol/kg, as described in Example 37.

[0101] FIG. 68 shows the plasma concentrations of the treatment groups of the same four constructs as per FIG. 67, dosed at 460 nmol/kg, as described in Example 37.

[0102] FIG. 69 shows the tissue concentrations of the two indicated treatment groups dosed at 26 nmol/kg, with FIG. 69A showing results at 24 h and FIG. 69B showing results at 72 h, as described in Example 37.

[0103] FIG. 70 shows the tissue concentrations of the two indicated treatment groups dosed at 460 nmol/kg, with FIG. 70A showing results at 24 h and FIG. 70B showing results at 72 h, as described in Example 37.

[0104] FIG. 71 shows the tissue concentrations of the two indicated treatment groups dosed at 26 nmol/kg, with FIG. 71A showing results at 24 h and FIG. 71B showing results at 72 h, as described in Example 37.

[0105] FIG. 72 shows the tissue concentrations of the two indicated treatment groups dosed at 460 nmol/kg, with FIG. 72A showing results at 24 h and FIG. 72B showing results at 72 h, as described in Example 37.

[0106] FIG. 73 shows the tumor and the plasma concentrations of the indicated two targeted constructs at 24 and 72 h intervals, as described in Example 37.

[0107] FIG. 74 shows the tumor volume data over time for the three indicated treatment groups and control, as described in Example 38.

[0108] FIG. 75 shows the body weight data over time for the three indicated treatment groups and control, as described in Example 38.

[0109] FIG. 76 shows the plasma concentrations of the five treatment groups dosed at 2 mg/kg each, as described in Example 39.

[0110] FIG. 77 shows the plasma concentrations of the five treatment groups dosed at 2 mg/kg each, as described in Example 39.

[0111] FIG. 78 shows binding of the two targeted constructs for its ligand, as described in Example 40.

[0112] FIG. 79 depicts results from the experiments to determine the in vitro selective activity of FA-XTEN432-3xMMAF in the presence and absence of folic acid; with FIG. 79A showing results for JEG-3, FIG. 79B for SW620 and FIG. 79C for SK-BR-3, as described in Example 41.

[0113] FIG. 80 shows the tumor volume data over time for the two treatment groups, as described in Example 42.

[0114] FIG. 81 shows the body weight data over time for the two treatment groups, as described in Example 42.

[0115] FIG. 82 shows the tumor volume data over time for the three treatment groups, as described in Example 42.

[0116] FIG. 83 depicts results from the experiments to determine the in vitro activity of CXTEN432-3xMMAE and anti-HER2scFv-3xMMAE-CXTEN720 in the presence and absence of trastuzumab; with FIG. 83A showing results for SK-BR-3, FIG. 83B for BT474, FIG. 83C for HCC1954, FIG. 83D for NCI-N87 and FIG. 83E for SK-OV-3, as described in Example 44.

[0117] FIG. 84 depicts results from the experiments to determine the in vitro activity of CXTEN432-3xDM1 and anti-HER2scFv-3xDM1-CXTEN720 in the presence and absence of trastuzumab; with FIG. 84A showing results for SK-BR-3, FIG. 84B for BT474, FIG. 84C for HCC1954, FIG. 84D for NCI-N87 and FIG. 84E for SK-OV-3, as described in Example 44.

[0118] FIG. 85 depicts results from the experiments to determine the in vitro activity of anti-HER2scFv-3xMMAE-CCD-XTEN757, protease treated and untreated anti-HER2scFv-3xMMAE-CCD-BSRS1-XTEN753 in NCI-N87, as described in Example 45.

[0119] FIG. 86 shows neutrophil elastase (NE) digestion of XTEN as described in Example 48. The materials per lane are: Lane 1: Marker; Lane 2: Undigested XTEN_AE864; Lane 3: XTEN_AE864 incubated at 37° C. with NE at 1:1000 molar ratio for 2 hours; Lane 4: XTEN_AE864 incubated at 37° C. with NE at 1:100 molar ratio for 2 hours.

[0120] FIG. 87 shows schematic representations of scFv and concatenate configurations. FIG. 87A shows two configurations of scFv that have, in a N-terminus to C-terminus orientations, VL-linker-VH or VL-linker-VH components of the framework or CDR variable segments depicted. FIG. 87B shows two configurations of concatenate fusion proteins that have, in a N-terminus to C-terminus orientations, FRL4 or FRH4 segments fused to CCD, PCM, and an XTEN sequence. FIG. 87C shows two configurations of concatenate fusion proteins that have, in a N-terminus to C-terminus orientations, an XTEN sequence fused to PCM, CCD, and FRL1 or FRH1 segments.

### DETAILED DESCRIPTION OF THE INVENTION

[0121] Before the embodiments of the invention are described, it is to be understood that such embodiments are provided by way of example only, and that various alternatives to the embodiments of the invention described herein may be employed in practicing the invention. Numerous variations, changes, and substitutions will now occur to those skilled in the art without departing from the invention.

[0122] Unless otherwise defined, all technical and scientific terms used herein have the same meaning as commonly understood by one of ordinary skill in the art to which this invention belongs. Although methods and materials similar or equivalent to those described herein can be used in the practice or testing of the present invention, suitable methods and materials are described below. In case of conflict, the patent specification, including definitions, will control. In addition, the materials, methods, and examples are illustrative only and not intended to be limiting. Numerous variations, changes, and substitutions will now occur to those skilled in the art without departing from the invention.

### DEFINITIONS

[0123] In the context of the present application, the following terms have the meanings ascribed to them unless specified otherwise:

[0124] As used throughout the specification and claims, the terms “a”, “an” and “the” are used in the sense that they mean “at least one”, “at least a first”, “one or more” or “a plurality” of the referenced components or steps, except in instances wherein an upper limit is thereafter specifically stated. Therefore, a “payload”, as used herein, means “at least a first payload” but includes a plurality of payloads. The operable limits and parameters of combinations, as with the amounts of any single agent, will be known to those of ordinary skill in the art in light of the present disclosure.

[0125] The terms “polypeptide”, “peptide”, and “protein” are used interchangeably herein to refer to polymers of amino acids of any length. The polymer may be linear or branched, it may comprise modified amino acids, and it may be interrupted by non-amino acids. The terms also encompass an amino acid polymer that has been modified, for example, by disulfide bond formation, glycosylation, lipidation, acetylation, phosphorylation, or any other manipulation, such as conjugation with a labeling component.

[0126] As used herein, the term “amino acid” refers to either natural and/or unnatural or synthetic amino acids, including but not limited to both the D or L optical isomers, and amino acid analogs and peptidomimetics. Standard single or three letter codes are used to designate amino acids.

[0127] A “pharmacologically active” agent includes any drug, compound, composition of matter or mixture desired to be delivered to a subject, e.g. therapeutic agents, diagnostic agents, or drug delivery agents, which provides or is expected to provide some pharmacologic, often beneficial, effect that can be demonstrated in vivo or in vitro. Such agents may include peptides, proteins, carbohydrates, nucleic acids, nucleosides, oligonucleotides, and small molecule synthetic compounds, or analogs thereof.

[0128] The term “natural L-amino acid” means the L optical isomer forms of glycine (G), proline (P), alanine (A), valine (V), leucine (L), isoleucine (I), methionine (M), cysteine (C), phenylalanine (F), tyrosine (Y), tryptophan (W), histidine (H), lysine (K), arginine (R), glutamine (Q), asparagine (N), glutamic acid (E), aspartic acid (D), serine (S), and threonine (T).

[0129] The term “non-naturally occurring,” as applied to sequences and as used herein, means polypeptide or polynucleotide sequences that do not have a counterpart to, are not complementary to, or do not have a high degree of homology with a wild-type or naturally-occurring sequence found in a mammal. For example, a non-naturally occurring polypeptide or fragment may share no more than 99%, 98%, 95%, 90%, 80%, 70%, 60%, 50% or even less amino acid sequence identity as compared to a natural sequence when suitably aligned.

[0130] The terms “hydrophilic” and “hydrophobic” refer to the degree of affinity that a substance has with water. A hydrophilic substance has a strong affinity for water, tending to dissolve in, mix with, or be wetted by water, while a hydrophobic substance substantially lacks affinity for water, tending to repel and not absorb water and tending not to dissolve in or mix with or be wetted by water. Amino acids can be characterized based on their hydrophobicity. A number of scales have been developed. An example is a scale developed by Levitt, M, et al., J Mol Biol (1976) 104:59, which is listed in Hopp, T P, et al., Proc Natl Acad Sci USA (1981) 78:3824. Examples of “hydrophilic amino acids” are arginine, lysine, threonine, alanine, asparagine, and glutamine, aspartate, glutamate, serine, and glycine. Examples of “hydrophobic amino acids” are tryptophan, tyrosine, phenylalanine, methionine, leucine, isoleucine, and valine.

[0131] A “fragment” when applied to a biologically active protein, is a truncated form of a the biologically active protein that retains at least a portion of the therapeutic and/or biological activity. A “variant,” when applied to a biologically active protein is a protein with sequence homology to the native biologically active protein that retains at least a portion of the therapeutic and/or biological activity of the biologically active protein. For example, a variant protein may share at least 70%, 75%, 80%, 85%, 90%, 95%, 96%, 97%, 98% or 99% amino acid sequence identity compared with the reference biologically active protein. As used herein, the term “biologically active protein variant” includes proteins modified deliberately, as for example, by site directed mutagenesis, synthesis of the encoding gene, insertions, or accidentally through mutations and that retain activity.

[0132] The term “sequence variant” means polypeptides that have been modified compared to their native or original sequence by one or more amino acid insertions, deletions, or substitutions. Insertions may be located at either or both termini of the protein, and/or may be positioned within internal regions of the amino acid sequence. A non-limiting example is insertion of an XTEN sequence within the sequence of the biologically-active payload protein. Another non-limiting example is substitution of an amino acid in an XTEN with a different amino acid. In deletion variants, one or more amino acid residues in a polypeptide as described herein are removed. Deletion variants, therefore, include all fragments of a payload polypeptide sequence. In substitution variants, one or more amino acid residues of a polypeptide are removed and replaced with alternative residues. In one aspect, the substitutions are conservative in nature.

[0133] The term “moiety” means a component of a larger composition or that is intended to be incorporated into a larger composition, such as a functional group of a drug molecule or a targeting peptide joined to a larger polypeptide.

[0134] As used herein, “terminal XTEN” refers to XTEN sequences that have been fused to or in the N- or C-terminus of the payload when the payload is a peptide or polypeptide.

[0135] The term “peptidyl cleavage moiety” or “PCM” refers to a cleavage sequence in cleavable conjugate compositions that can be recognized and cleaved by one or more proteases, effecting release of a payload, an XTEN, or a portion of an XTEN-conjugate from the XTEN-conjugate. As used herein, “mammalian protease” means a protease that normally exists in the body fluids, cells or tissues of a mammal. PCM sequences can be engineered to be cleaved by various mammalian proteases that are present in or proximal to target tissues in a subject or mammalian cell lines in an in vitro assay. Other equivalent proteases (endogenous or exogenous) that are capable of recognizing a defined cleavage site can be utilized. It is specifically contemplated that the PCM sequence can be adjusted and tailored to the protease utilized and can incorporate linker amino acids to join to adjacent polypeptides

[0136] The term “within”, when referring to a first polypeptide being linked to a second polypeptide, encompasses linking that connects the N-terminus of the first or second polypeptide to the C-terminus of the second or first polypeptide, respectively, as well as insertion of the first polypeptide into the sequence of the second polypeptide. For example, when an XTEN is linked “within” a payload polypeptide, the XTEN may be linked to the N-terminus, the C-terminus, or may be inserted between any two amino acids of the payload polypeptide.

[0137] “Activity” as applied to the subject compositions provided herein, refers to an action or effect, including but not limited to receptor binding, antagonist activity, agonist activity, a cellular or physiologic response, or an effect generally known in the art for the payload component of the composition, whether measured by an in vitro, ex vivo or in vivo assay or a clinical effect.

[0138] As used herein, the term “ELISA” refers to an enzyme-linked immunosorbent assay as described herein or as otherwise known in the art.

[0139] A “host cell” includes an individual cell or cell culture which can be or has been a recipient for the subject vectors such as those described herein. In some cases the host cell is a prokaryote, which may include E. coli. In other cases, a host cell is a eukaryotic cell, which may be a yeast, a non-human mammalian cell, or a human-derived cell. Host cells include progeny of a single host cell. The progeny may not necessarily be completely identical (in morphology or in genomic of total DNA complement) to the original parent cell due to natural, accidental, or deliberate mutation. A host cell includes cells transfected in vivo with a vector of this invention.

[0140] “Isolated” when used to describe the various polypeptides disclosed herein, means a polypeptide that has been identified and separated and/or recovered from a component of its natural environment. Contaminant components of its natural environment are materials that would typically interfere with diagnostic or therapeutic uses for the polypeptide, and may include enzymes, hormones, and other proteinaceous or non-proteinaceous solutes. As is apparent to those of skill in the art, a non-naturally occurring polynucleotide, peptide, polypeptide, protein, antibody, or fragments thereof, does not require “isolation” to distinguish it from its naturally occurring counterpart. In addition, a “concentrated”, “separated” or “diluted” polynucleotide, peptide, polypeptide, protein, antibody, or fragments thereof, is distinguishable from its naturally occurring counterpart in that the concentration or number of molecules per volume is generally greater than that of its naturally occurring counterpart. In general, a polypeptide made by recombinant means and expressed in a host cell is considered to be “isolated.”

[0141] An “isolated” nucleic acid is a nucleic acid molecule that is identified and separated from at least one contaminant nucleic acid molecule with which it is ordinarily associated in the natural source of the polypeptide-encoding nucleic acid. For example, an isolated polypeptide-encoding nucleic acid molecule is other than in the form or setting in which it is found in nature. Isolated polypeptide-encoding nucleic acid molecules therefore are distinguished from the specific polypeptide-encoding nucleic acid molecule as it exists in natural cells. However, an isolated polypeptide-encoding nucleic acid molecule includes polypeptide-encoding nucleic acid molecules contained in cells that ordinarily express the polypeptide where, for example, the nucleic acid molecule is in a chromosomal or extra-chromosomal location different from that of natural cells.

[0142] A “chimeric” protein contains at least one fusion polypeptide comprising at least one region in a different position in the sequence than that which occurs in nature. The regions may normally exist in separate proteins and are brought together in the fusion polypeptide; or they may normally exist in the same protein but are placed in a new arrangement in the fusion polypeptide. A chimeric protein may be created, for example, by chemical synthesis, or by creating and translating a polynucleotide in which the peptide regions are encoded in the desired relationship.

[0143] “Fused,” and “fusion” are used interchangeably herein, and refers to the joining together of two or more peptide or polypeptide sequences by recombinant means. A “fusion protein” or “chimeric protein” comprises a first amino acid sequence linked to a second amino acid sequence with which it is not naturally linked in nature.

[0144] “Operably linked” means that the DNA sequences being linked are contiguous, and in reading phase or in-frame. An “in-frame fusion” refers to the joining of two or more open reading frames (ORFs) to form a continuous longer ORF, in a manner that maintains the correct reading frame of the original ORFs. For example, a promoter or enhancer is operably linked to a coding sequence for a polypeptide if it affects the transcription of the polypeptide sequence. Thus, the resulting recombinant fusion protein is a single protein containing two or more segments that correspond to polypeptides encoded by the original ORFs (which segments are not normally so joined in nature).

[0145] “Crosslinking,” “conjugating,” “link,” “linking” and “joined to” are used interchangeably herein, and refer to the covalent joining of two different molecules by a chemical reaction. The crosslinking can occur in one or more chemical reactions, as described more fully, below.

[0146] The term “conjugation partner” as used herein, refers to the individual components that can be linked or are linked in a conjugation reaction.

[0147] The term “conjugate” is intended to refer to the heterogeneous molecule formed as a result of covalent linking of conjugation partners one to another, e.g., a biologically active payload covalently linked to a XTEN molecule or a cross-linker covalently linked to a reactive XTEN.

[0148] “Cross-linker” and “linker” and “cross-linking agent” are used interchangably and in their broadest context to mean a chemical entity used to covalently join two or more entities. For example, a cross-linker joins two, three, four or more XTEN, or joins a payload to an XTEN, as the entities are defined herein. A cross-linker includes, but is not limited to, the reaction product of small molecule zero-length, homo- or hetero-bifunctional, and multifunctional cross-linker compounds, the reaction product of two click-chemstry reactants. It will be understood by one of skill in the art that a cross-linker can refer to the covalently-bound reaction product remaining after the crosslinking of the reactants. The cross-linker can also comprise one or more reactants which have not yet reacted but which are capable to react with another entity.

[0149] In the context of polypeptides, a “linear sequence” or a “sequence” is an order of amino acids in a polypeptide in an amino to carboxyl terminus direction in which residues that neighbor each other in the sequence are contiguous in the primary structure of the polypeptide. A “partial sequence” is a linear sequence of part of a polypeptide that is known to comprise additional residues in one or both directions.

[0150] “Heterologous” means derived from a genotypically distinct entity from the rest of the entity to which it is being compared. For example, a glycine rich sequence removed from its native coding sequence and operatively linked to a coding sequence other than the native sequence is a heterologous glycine rich sequence. The term “heterologous” as applied to a polynucleotide or a polypeptide, means that the polynucleotide or polypeptide is derived from a genotypically distinct entity from that of the rest of the entity to which it is being compared.

[0151] The terms “polynucleotides”, “nucleic acids”, “nucleotides” and “oligonucleotides” are used interchangeably. They refer to nucleotides of any length, encompassing a singular nucleic acid as well as plural nucleic acids, either deoxyribonucleotides or ribonucleotides, or analogs thereof. Polynucleotides may have any three-dimensional structure, and may perform any function, known or unknown. The following are non-limiting examples of polynucleotides: coding or non-coding regions of a gene or gene fragment, loci (locus) defined from linkage analysis, exons, introns, messenger RNA (mRNA), transfer RNA, ribosomal RNA, ribozymes, cDNA, recombinant polynucleotides, branched polynucleotides, plasmids, vectors, isolated DNA of any sequence, isolated RNA of any sequence, nucleic acid probes, and primers. A polynucleotide may comprise modified nucleotides, such as methylated nucleotides and nucleotide analogs. If present, modifications to the nucleotide structure may be imparted before or after assembly of the polymer. The sequence of nucleotides may be interrupted by non-nucleotide components. A polynucleotide may be further modified after polymerization, such as by conjugation with a labeling component.

[0152] The term “complement of a polynucleotide” denotes a polynucleotide molecule having a complementary base sequence and reverse orientation as compared to a reference sequence, such that it could hybridize with a reference sequence with complete fidelity.

[0153] “Recombinant” as applied to a polynucleotide means that the polynucleotide is the product of various combinations of recombination steps which may include cloning, restriction and/or ligation steps, and other procedures that result in expression of a recombinant protein in a host cell.

[0154] The terms “gene” and “gene fragment” are used interchangeably herein. They refer to a polynucleotide containing at least one open reading frame that is capable of encoding a particular protein after being transcribed and translated. A gene or gene fragment may be genomic or cDNA, as long as the polynucleotide contains at least one open reading frame, which may cover the entire coding region or a segment thereof. A “fusion gene” is a gene composed of at least two heterologous polynucleotides that are linked together.

[0155] As used herein, a “coding region” or “coding sequence” is a portion of polynucleotide which consists of codons translatable into amino acids. Although a “stop codon” (TAG, TGA, or TAA) is typically not translated into an amino acid, it may be considered to be part of a coding region, but any flanking sequences, for example promoters, ribosome binding sites, transcriptional terminators, introns, and the like, are not part of a coding region. The boundaries of a coding region are typically determined by a start codon at the 5′ terminus, encoding the amino terminus of the resultant polypeptide, and a translation stop codon at the 3′ terminus, encoding the carboxyl terminus of the resulting polypeptide. Two or more coding regions of the present invention can be present in a single polynucleotide construct, e.g., on a single vector, or in separate polynucleotide constructs, e.g., on separate (different) vectors. It follows, then, that a single vector can contain just a single coding region, or comprise two or more coding regions, e.g., a single vector can separately encode a binding domain-A and a binding domain-B as described below. In addition, a vector, polynucleotide, or nucleic acid of the invention can encode heterologous coding regions, either fused or unfused to a nucleic acid encoding a binding domain of the invention. Heterologous coding regions include without limitation specialized elements or motifs, such as a secretory signal peptide or a heterologous functional domain.

[0156] The term “downstream” refers to a nucleotide sequence that is located 3′ to a reference nucleotide sequence. In certain embodiments, downstream nucleotide sequences relate to sequences that follow the starting point of transcription. For example, the translation initiation codon of a gene is located downstream of the start site of transcription.

[0157] The term “upstream” refers to a nucleotide sequence that is located 5′ to a reference nucleotide sequence. In certain embodiments, upstream nucleotide sequences relate to sequences that are located on the 5′ side of a coding region or starting point of transcription. For example, most promoters are located upstream of the start site of transcription.

[0158] “Homology” or “homologous” or “sequence identity” refers to sequence similarity or interchangeability between two or more polynucleotide sequences or between two or more polypeptide sequences. When using a program such as BestFit to determine sequence identity, similarity or homology between two different amino acid sequences, the default settings may be used, or an appropriate scoring matrix, such as blosum45 or blosum80, may be selected to optimize identity, similarity or homology scores. Preferably, polynucleotides that are homologous are those which hybridize under stringent conditions as defined herein and have at least 70%, preferably at least 80%, more preferably at least 90%, more preferably 95%, more preferably 97%, more preferably 98%, and even more preferably 99% sequence identity compared to those sequences. Polypeptides that are homologous preferably have sequence identities that are at least 70%, preferably at least 80%, even more preferably at least 90%, even more preferably at least 95-99% identical.

[0159] “Ligation” as applied to polynucleic acids refers to the process of forming phosphodiester bonds between two nucleic acid fragments or genes, linking them together. To ligate the DNA fragments or genes together, the ends of the DNA must be compatible with each other. In some cases, the ends will be directly compatible after endonuclease digestion. However, it may be necessary to first convert the staggered ends commonly produced after endonuclease digestion to blunt ends to make them compatible for ligation.

[0160] The terms “stringent conditions” or “stringent hybridization conditions” includes reference to conditions under which a polynucleotide will hybridize to its target sequence, to a detectably greater degree than other sequences (e.g., at least 2-fold over background). Generally, stringency of hybridization is expressed, in part, with reference to the temperature and salt concentration under which the wash step is carried out. Typically, stringent conditions will be those in which the salt concentration is less than about 1.5 M Na ion, typically about 0.01 to 1.0 M Na ion concentration (or other salts) at pH 7.0 to 8.3 and the temperature is at least about 30° C. for short polynucleotides (e.g., 10 to 50 nucleotides) and at least about 60° C. for long polynucleotides (e.g., greater than 50 nucleotides)—for example, “stringent conditions” can include hybridization in 50% formamide, 1 M NaCl, 1% SDS at 37° C., and three washes for 15 min each in 0.1×SSC/1% SDS at 60° C. to 65° C. Alternatively, temperatures of about 65° C., 60° C., 55° C., or 42° C. may be used. SSC concentration may be varied from about 0.1 to 2×SSC, with SDS being present at about 0.1%. Such wash temperatures are typically selected to be about 5° C. to 20° C. lower than the thermal melting point for the specific sequence at a defined ionic strength and pH. The Tm is the temperature (under defined ionic strength and pH) at which 50% of the target sequence hybridizes to a perfectly matched probe. An equation for calculating Tm and conditions for nucleic acid hybridization are well known and can be found in Sambrook, J. et al., “Molecular Cloning: A Laboratory Manual,” 3^{rd} edition, Cold Spring Harbor Laboratory Press, 2001. Typically, blocking reagents are used to block non-specific hybridization. Such blocking reagents include, for instance, sheared and denatured salmon sperm DNA at about 100-200 μg/ml. Organic solvent, such as formamide at a concentration of about 35-50% v/v, may also be used under particular circumstances, such as for RNA:DNA hybridizations. Useful variations on these wash conditions will be readily apparent to those of ordinary skill in the art.

[0161] The terms “percent identity,” percentage of sequence identity,” and “% identity,” as applied to polynucleotide sequences, refer to the percentage of residue matches between at least two polynucleotide sequences aligned using a standardized algorithm. Such an algorithm may insert, in a standardized and reproducible way, gaps in the sequences being compared in order to optimize alignment between two sequences, and therefore achieve a more meaningful comparison of the two sequences. Percent identity may be measured over the length of an entire defined polynucleotide sequence, or may be measured over a shorter length, for example, over the length of a fragment taken from a larger, defined polynucleotide sequence, for instance, a fragment of at least 45, at least 60, at least 90, at least 120, at least 150, at least 210 or at least 450 contiguous residues. Such lengths are exemplary only, and it is understood that any fragment length supported by the sequences shown herein, in the tables, figures or Sequence Listing, may be used to describe a length over which percentage identity may be measured. The percentage of sequence identity is calculated by comparing two optimally aligned sequences over the window of comparison, determining the number of matched positions (at which identical residues occur in both polypeptide sequences), dividing the number of matched positions by the total number of positions in the window of comparison (i.e., the window size), and multiplying the result by 100 to yield the percentage of sequence identity. When sequences of different length are to be compared, the shortest sequence defines the length of the window of comparison. Conservative substitutions are not considered when calculating sequence identity.

[0162] “Percent identity,” with respect to the polypeptide sequences identified herein, is defined as the percentage of amino acid residues in a query sequence that are identical with the amino acid residues of a second, reference polypeptide sequence or a portion thereof, after aligning the sequences and introducing gaps, if necessary, to achieve the maximum percent sequence identity, and not considering any conservative substitutions as part of the sequence identity, thereby resulting in optimal alignment. Alignment for purposes of determining percent amino acid sequence identity can be achieved in various ways that are within the skill in the art, for instance, using publicly available computer software such as BLAST, BLAST-2, ALIGN or Megalign (DNASTAR) software. Those skilled in the art can determine appropriate parameters for measuring alignment, including any algorithms needed to achieve optimal alignment over the full length of the sequences being compared. Percent identity may be measured over the length of an entire defined polypeptide sequence, or may be measured over a shorter length, for example, over the length of a fragment taken from a larger, defined polypeptide sequence, for instance, a fragment of at least 15, at least 20, at least 30, at least 40, at least 50, at least 70 or at least 150 contiguous residues. Such lengths are exemplary only, and it is understood that any fragment length supported by the sequences shown herein, in the tables, figures or Sequence Listing, may be used to describe a length over which percentage identity may be measured.

[0163] “Repetitiveness” used in the context of polynucleotide sequences refers to the degree of internal homology in the sequence such as, for example, the frequency of identical nucleotide sequences of a given length. Repetitiveness can, for example, be measured by analyzing the frequency of identical sequences.

[0164] In general, a marker (e.g. a protease or a ligand targeted by a TM) may be considered “associated with” or “colocalized with”a target cell or target tissue if it occurs with greater frequency or at higher concentration in, on, or in proximity to the target cell or target tissue, as compared to non-target cells or non-target tissue. For example, a marker may be considered associated with a target tissue if it occurs at a higher concentration in a fluid surrounding a target tissue than if found in fluid more distant from the target tissue. In some embodiments, a marker associated with a target cell is expressed by the target cell at a higher level than by non-target cells. In some embodiments, a marker associated with a target tissue is expressed at a higher level by one or more cells in the target tissue than by cells in non-target tissues. However, markers need not be expressed by a target cell or target tissue in order to be associated with such cell or tissue. For example, an inflammatory marker may be associated with a particular inflamed tissue but be expressed by an immune cell recruited to the tissue. Similarly, a microbial antigen that occurs with greater frequency in infected tissue is considered associated with such infected tissue, even though derived from the microbe. In some embodiments, a marker is associated with a disease or condition, such that the marker occurs more frequently or at higher levels among individuals with the disease or condition than in individuals without the disease or condition.

[0165] The term “expression” as used herein refers to a process by which a polynucleotide produces a gene product, for example, an RNA or a polypeptide. It includes without limitation transcription of the polynucleotide into messenger RNA (mRNA), transfer RNA (tRNA), small hairpin RNA (shRNA), small interfering RNA (siRNA) or any other RNA product, and the translation of an mRNA into a polypeptide. Expression produces a “gene product.” As used herein, a gene product can be either a nucleic acid, e.g., a messenger RNA produced by transcription of a gene, or a polypeptide which is translated from a transcript. Gene products described herein further include nucleic acids with post transcriptional modifications, e.g., polyadenylation or splicing, or polypeptides with post translational modifications, e.g., methylation, glycosylation, the addition of lipids, association with other protein subunits, or proteolytic cleavage.

[0166] A “vector” or “expression vector” are used interchangably and refers to a nucleic acid molecule, preferably self-replicating in an appropriate host, which transfers an inserted nucleic acid molecule into and/or between host cells. The term includes vectors that function primarily for insertion of DNA or RNA into a cell, replication of vectors that function primarily for the replication of DNA or RNA, and expression vectors that function for transcription and/or translation of the DNA or RNA. Also included are vectors that provide more than one of the above functions. An “expression vector” is a polynucleotide which, when introduced into an appropriate host cell, can be transcribed and translated into a polypeptide(s). An “expression system” usually connotes a suitable host cell comprised of an expression vector that can function to yield a desired expression product.

[0167] “Serum degradation resistance,” as applied to a polypeptide, refers to the ability of the polypeptides to withstand degradation in blood or components thereof, which typically involves proteases in the serum or plasma. The serum degradation resistance can be measured by combining the protein with human (or mouse, rat, monkey, as appropriate) serum or plasma, typically for a range of days (e.g. 0.25, 0.5, 1, 2, 4, 8, 16 days), typically at about 37° C. The samples for these time points can be run on a Western blot assay and the protein is detected with an antibody. The antibody can be to a tag in the protein. If the protein shows a single band on the western, where the protein's size is identical to that of the injected protein, then no degradation has occurred. In this exemplary method, the time point where 50% of the protein is degraded, as judged by Western blots or equivalent techniques, is the serum degradation half-life or “serum half-life” of the protein.

[0168] The terms “t_{1/2}”, “half-life”, “terminal half-life”, “elimination half-life” and “circulating half-life” are used interchangeably herein and, as used herein means the terminal half-life calculated as ln(2)/Kₑₗ. Kₑₗ is the terminal elimination rate constant calculated by linear regression of the terminal linear portion of the log concentration vs. time curve. Half-life typically refers to the time required for half the quantity of an administered substance deposited in a living organism to be metabolized or eliminated by normal biological processes. When a clearance curve of a given polypeptide is constructed as a function of time, the curve is usually biphasic with a rapid a-phase and longer β-phase. The typical β phase half-life of a human antibody in humans is 21 days.

[0169] “Active clearance” means the mechanisms by which a protein is removed from the circulation other than by filtration, and which includes removal from the circulation mediated by cells, receptors, metabolism, or degradation of the protein.

[0170] “Apparent molecular weight factor” and “apparent molecular weight” are related terms referring to a measure of the relative increase or decrease in apparent molecular weight exhibited by a particular amino acid or polypeptide sequence. The apparent molecular weight is determined using size exclusion chromatography (SEC) or similar methods by comparing to globular protein standards, and is measured in “apparent kD” units. The apparent molecular weight factor is the ratio between the apparent molecular weight and the actual molecular weight; the latter predicted by adding, based on amino acid composition, the calculated molecular weight of each type of amino acid in the composition or by estimation from comparison to molecular weight standards in an SDS electrophoresis gel. Determination of both the apparent molecular weight and apparent molecular weight factor for representative proteins is described in the Examples.

[0171] The terms “hydrodynamic radius” or “Stokes radius” is the effective radius (Rₕ in nm) of a molecule in a solution measured by assuming that it is a body moving through the solution and resisted by the solution's viscosity. In the embodiments of the invention, the hydrodynamic radius measurements of the XTEN polypeptides correlate with the “apparent molecular weight factor” which is a more intuitive measure. The “hydrodynamic radius” of a protein affects its rate of diffusion in aqueous solution as well as its ability to migrate in gels of macromolecules. The hydrodynamic radius of a protein is determined by its molecular weight as well as by its structure, including shape and compactness. Methods for determining the hydrodynamic radius are well known in the art, such as by the use of size exclusion chromatography (SEC), as described in U.S. Pat. Nos. 6,406,632 and 7,294,513. Most proteins have globular structure, which is the most compact three-dimensional structure a protein can have with the smallest hydrodynamic radius. Some proteins adopt a random and open, unstructured, or ‘linear’ conformation and as a result have a much larger hydrodynamic radius compared to typical globular proteins of similar molecular weight.

[0172] “Physiological conditions” refers to a set of conditions in a living host as well as in vitro conditions, including temperature, salt concentration, pH, that mimic those conditions of a living subject. A host of physiologically relevant conditions for use in in vitro assays have been established. Generally, a physiological buffer contains a physiological concentration of salt and is adjusted to a neutral pH ranging from about 6.5 to about 7.8, and preferably from about 7.0 to about 7.5. A variety of physiological buffers are listed in Sambrook et al. (2001). Physiologically relevant temperature ranges from about 25° C. to about 38° C., and preferably from about 35° C. to about 37° C.

[0173] A “single atom residue of a payload” means the atom of a payload that is chemically linked to XTEN after reaction with the subject XTEN or XTEN-linker compositions; typically a sulfur, an oxygen, a nitrogen, or a carbon atom. For example, an atom residue of a payload could be a sulfur residue of a cysteine thiol reactive group in a payload, a nitrogen molecule of an amino reactive group of a peptide or polypeptide or small molecule payload, a carbon or oxygen residue or a reactive carboxyl or aldehyde group of a peptide, protein or a small molecule or synthetic, organic drug.

[0174] A “reactive group” is a chemical structure that can be coupled to a second reactive group. Examples of reactive groups are amino groups, carboxyl groups, sulfhydryl groups, hydroxyl groups, aldehyde groups, azide groups. Some reactive groups can be activated to facilitate conjugation with a second reactive group, either directly or through a cross-linker. As used herein, a reactive group can be a part of an XTEN, a cross-linker, an azide/alkyne click-chemistry reactant, or a payload so long as it has the ability to participate in a chemical reaction. Once reacted, a conjugation bond links the residues of the payload or cross-linker or XTEN reactants.

[0175] “Controlled release agent”, “slow release agent”, “depot formulation” and “sustained release agent” are used interchangeably to refer to an agent capable of extending the duration of release of a polypeptide of the invention relative to the duration of release when the polypeptide is administered in the absence of agent. Different embodiments of the present invention may have different release rates, resulting in different therapeutic amounts.

[0176] The term “payload” as used herein refers to any protein, peptide sequence, small molecule, drug or composition of matter that has a biological, pharmacological or therapeutic activity or beneficial effect that can be demonstrated in an in vitro assay or when administered to a subject. Payload also includes a molecule that can be used for imaging or in vivo diagnostic purposes. Examples of payloads include, but are not limited to, cytokines, enzymes, hormones, blood coagulation factors, and growth factors, chemotherapeutic agents, antiviral compounds, toxins, anti-cancer drugs, cytotoxic drugs, radioactive compounds, and contrast agents, but, in the context of some aspects of the instant invention, specifically excludes targeting moieties, antibodies, antibody fragments, or organic small molecule compounds used solely to bind to receptors or ligands for purposes of localizing the compositions of the instant invention to target tissues.

[0177] The term “targeting moiety” (abbreviated “TM”), as used herein, is specifically intended to include antibodies, antibody fragments, the categories of binding molecules listed in Table 1, or peptides, hormones, or organic molecules that have specific binding affinity for a target ligand such as cell-surface receptors or antigens or glycoproteins, oligonucleotides, enzymatic substrates, antigenic determinants, or binding sites that may be present in the on the surface of a target tissue or cell. In some embodiments, a TM is non-proteinaceous. Non-limiting examples of non-proteinaceous TMs are provided herein, such as folate.

[0178] The terms “antigen”, “target antigen” and “immunogen” are used interchangeably herein to refer to the structure or binding determinant that an antibody, antibody fragment or an antibody fragment-based molecule binds to or has specificity against.

[0179] The term “antagonist”, as used herein, includes any molecule that partially or fully blocks, inhibits, or neutralizes a biological activity of a native polypeptide disclosed herein. Methods for identifying antagonists of a polypeptide may comprise contacting a native polypeptide with a candidate antagonist molecule and measuring a detectable change in one or more biological activities normally associated with the native polypeptide. In the context of the present invention, antagonists may include proteins, nucleic acids, carbohydrates, antibodies or any other molecules that decrease the effect of a biologically active protein.

[0180] A “target” refers to the ligand of a targeting moiety, such as cell-surface receptors, antigens, glycoproteins, oligonucleotides, enzymatic substrates, antigenic determinants, or binding sites that may be present in the on the surface of a target tissue or cell.

[0181] A “target tissue” refers to a tissue that is the cause of or is part of a disease condition such as, but not limited to cancer or inflammatory conditions. Sources of diseased target tissue include a body organ, a tumor, a cancerous cell, bone, skin, cells that produce cytokines or factors contributing to a disease condition.

[0182] A “defined medium” refers to a medium comprising nutritional and hormonal requirements necessary for the survival and/or growth of the cells in culture such that the components of the medium are known. Traditionally, the defined medium has been formulated by the addition of nutritional and growth factors necessary for growth and/or survival. Typically, the defined medium provides at least one component from one or more of the following categories: a) all essential amino acids, and usually the basic set of twenty amino acids plus cysteine; b) an energy source, usually in the form of a carbohydrate such as glucose; c) vitamins and/or other organic compounds required at low concentrations; d) free fatty acids; and e) trace elements, where trace elements are defined as inorganic compounds or naturally occurring elements that are typically required at very low concentrations, usually in the micromolar range. The defined medium may also optionally be supplemented with one or more components from any of the following categories: a) one or more mitogenic agents; b) salts and buffers as, for example, calcium, magnesium, and phosphate; c) nucleosides and bases such as, for example, adenosine and thymidine, hypoxanthine; and d) protein and tissue hydrolysates.

[0183] The term “agonist” is used in the broadest sense and includes any molecule that mimics a biological activity of a native polypeptide disclosed herein. Suitable agonist molecules specifically include agonist antibodies or antibody fragments, fragments or amino acid sequence variants of native polypeptides, peptides, small organic molecules, etc. Methods for identifying agonists of a native polypeptide may comprise contacting a native polypeptide with a candidate agonist molecule and measuring a detectable change in one or more biological activities normally associated with the native polypeptide.

[0184] “Inhibition constant”, or “Ki”, are used interchangeably and mean the dissociation constant of the enzyme-inhibitor complex, or the reciprocal of the binding affinity of the inhibitor to the enzyme.

[0185] As used herein, “treat” or “treating,” or “palliating” or “ameliorating” are used interchangeably and mean administering a drug or a biologic to achieve a therapeutic benefit, to cure or reduce the severity of an existing condition, or to achieve a prophylactic benefit, prevent or reduce the likelihood of onset or severity the occurrence of a condition. By therapeutic benefit is meant eradication or amelioration of the underlying condition being treated or one or more of the physiological symptoms associated with the underlying condition such that an improvement is observed in the subject, notwithstanding that the subject may still be afflicted with the underlying condition.

[0186] A “therapeutic effect” or “therapeutic benefit,” as used herein, refers to a physiologic effect, including but not limited to the mitigation, amelioration, or prevention of disease in humans or other animals, or to otherwise enhance physical or mental wellbeing of humans or animals, resulting from administration of a polypeptide of the invention other than the ability to induce the production of an antibody against an antigenic epitope possessed by the biologically active protein. For prophylactic benefit, the compositions may be administered to a subject at risk of developing a particular disease, condition or symptom of the disease (e.g., a bleed in a diagnosed hemophilia A subject), or to a subject reporting one or more of the physiological symptoms of a disease, even though a diagnosis of this disease may not have been made.

[0187] The terms “therapeutically effective amount” and “therapeutically effective dose”, as used herein, refer to an amount of a drug or a biologically active protein, either alone or as a part of a polypeptide composition, that is capable of having any detectable, beneficial effect on any symptom, aspect, measured parameter or characteristics of a disease state or condition when administered in one or repeated doses to a subject. Such effect need not be absolute to be beneficial. Determination of a therapeutically effective amount is well within the capability of those skilled in the art, especially in light of the detailed disclosure provided herein.

[0188] The term “therapeutically effective dose regimen”, as used herein, refers to a schedule for consecutively administered multiple doses (i.e., at least two or more) of a biologically active protein, either alone or as a part of a polypeptide composition, wherein the doses are given in therapeutically effective amounts to result in sustained beneficial effect on any symptom, aspect, measured parameter or characteristics of a disease state or condition.

### I). General Techniques

[0189] The practice of the present invention employs, unless otherwise indicated, conventional techniques of immunology, biochemistry, chemistry, molecular biology, microbiology, cell biology, genomics and recombinant DNA, which are within the skill of the art. See Sambrook, J. et al., “Molecular Cloning: A Laboratory Manual,” 3^{rd} edition, Cold Spring Harbor Laboratory Press, 2001; “Current protocols in molecular biology”, F. M. Ausubel, et al. eds.,1987; the series “Methods in Enzymology,” Academic Press, San Diego, Calif.; “PCR 2: a practical approach”, M. J. MacPherson, B. D. Hames and G. R. Taylor eds., Oxford University Press, 1995; “Antibodies, a laboratory manual” Harlow, E. and Lane, D. eds., Cold Spring Harbor Laboratory,1988; “Goodman & Gilman's The Pharmacological Basis of Therapeutics,” 11^{th} Edition, McGraw-Hill, 2005; and Freshney, R. I., “Culture of Animal Cells: A Manual of Basic Technique,” 4^{th} edition, John Wiley & Sons, Somerset, N.J., 2000, the contents of which are incorporated in their entirety herein by reference.

[0190] Host cells can be cultured in a variety of media. Commercially available media such as Ham's F10 (Sigma), Minimal Essential Medium (MEM, Sigma), RPMI-1640 (Sigma), and Dulbecco's Modified Eagle's Medium (DMEM, Sigma) are suitable for culturing eukaryotic cells. In addition, mammalian host cells can be grown in a defined medium that lacks serum but is supplemented with hormones, growth factors or any other factors necessary for the survival and/or growth of a particular cell type. Whereas a defined medium supporting cell survival maintains the viability, morphology, capacity to metabolize and potentially, capacity of the cell to differentiate, a defined medium promoting cell growth provides all chemicals necessary for cell proliferation or multiplication. The general parameters governing host cell survival and growth in vitro are well established in the art. Physicochemical parameters which may be controlled in different cell culture systems are, e.g., pH, pO₂, temperature, and osmolarity. The nutritional requirements of cells are usually provided in standard media formulations developed to provide an optimal environment. Nutrients can be divided into several categories: amino acids and their derivatives, carbohydrates, sugars, fatty acids, complex lipids, nucleic acid derivatives and vitamins. Apart from nutrients for maintaining cell metabolism, most cells also require one or more hormones from at least one of the following groups: steroids, prostaglandins, growth factors, pituitary hormones, and peptide hormones to proliferate in serum-free media (Sato, G. H., et al. in “Growth of Cells in Hormonally Defined Media”, Cold Spring Harbor Press, N.Y., 1982). In addition to hormones, cells may require transport proteins such as transferrin (plasma iron transport protein), ceruloplasmin (a copper transport protein), and high-density lipoprotein (a lipid carrier) for survival and growth in vitro. The set of optimal hormones or transport proteins will vary for each cell type. Most of these hormones or transport proteins have been added exogenously or, in a rare case, a mutant cell line has been found which does not require a particular factor. Those skilled in the art will know of other factors required for maintaining a cell culture without undue experimentation.

[0191] Growth media for growth of prokaryotic host cells include nutrient broths (liquid nutrient medium) or LB medium (Luria Bertani). Suitable media include defined and undefined media. In general, media contains a carbon source such as glucose needed for bacterial growth, water, and salts. Media may also include a source of amino acids and nitrogen, for example beef or yeast extract (in an undefined medium) or known quantities of amino acids (in a defined medium). In some embodiments, the growth medium is LB broth, for example LB Miller broth or LB Lennox broth. LB broth comprises peptone (enzymatic digestion product of casein), yeast extract and sodium chloride. In some embodiments, a selective medium is used which comprises an antibiotic. In this medium, only the desired cells possessing resistance to the antibiotic will grow.

### II). XTEN and Targeted Cytotoxic Conjugate Compositions

[0192] The present invention relates, in part, to targeted conjugate compositions comprising drug payloads capable of selectively binding a target tissue such as a tumor or cancer cell or inflammatory tissue, such that the drug component is taken up by the targeted cell, thereby effecting the pharmacologic effect, wherein the composition comprises one or more XTEN, which confers shielding and enhanced pharmacokinetic and pharmaceutical properties. The invention contemplates several different configurations of the compositions in order to confer certain properties on the subject compositions. In a first type of configuration, the conjugate compositions comprise a fusion protein of a first short polypeptide portion comprising hydrophilic amino acids interspersed with cysteine residues (referred to hereafter as a cysteine containing domain, or CCD) fused to a second portion longer than said first portion that comprises an XTEN polypeptide, and a third portion comprises a targeting moiety (TM) that is capable of specifically binding a ligand associated with the target tissue, and pharmacologically active drugs or biologics (including cytotoxic drugs capable of killing the cells bearing the target cell ligand or anti-inflammatory drugs) conjugated to the cysteine residues of the CCD wherein the targeting moiety binds to the targeted cell and is internalized and degraded, releasing the drug or biologic to exert its pharmacologic effect. In a second type of configuration, the targeted conjugate composition has, in addition to the foregoing components, a protease cleavage moiety (PCM) inserted recombinantly between the CCD and the XTEN, wherein the PCM is capable of being cleaved by a mammalian protease associated with or in proximity to the target tissue. In such case, when the composition is in proximity to, or is bound to the target tissue or cell, the XTEN is released from the composition by the action of the protease, greatly reducing the size of the remaining portion of the construct (the remaining portion hereinafter refered to as a “released targeted composition”, which comprises the one or more targeting moieties fused or linked to the CCD and the drug or biologic linked to the CCD) and shielding effect imparted by the XTEN such that the released targeted composition having the TM and CCD with the attached drugs is better able to extravasate and penetrate the target tissue and be taken up by the cell bearing the ligand of the targeting moiety, whereupon by the internal processing of the molecule, the released drugs exert their pharmacologic effect (see e.g. FIGS. 18, 38 and 40 for a schematic representation of the foregoing process). Thus, the second type is designed to be utilized as a form of prodrug in that the compositions with the release of the shielding XTEN, and the released targeted composition becomes more active than the intact composition, more selective, are better able to extravasate, are better able to penetrate the target tissue, and has higher binding affinity due to the loss of the shielding effect and/or steric hinderance. In an advantage of these compositions, because of the shielding and bulking effects of the XTEN, the intact composition is less likely to interact or bind to normal tissues (that may have a low frequency of receptors that are ligands for the TM, compared to the target tissue) and is less likely to extravasate from normal vasculature in healthy organs and tissues, resulting in less toxicity and fewer side effects compared to conventional chemotherapeutic or biologics. Once the intact composition is are cleaved by the proteases found colocalized in association with the target tissues, the released targeted composition is no longer shielded and regains its full binding affinity potential and because of its much smaller size, can more easily extravasate and penetrate the target tissue. Such compositions are useful in the treatment of certain diseases, including, but not limited to cancer and certain inflammatory diseases. The invention contemplates additional configurations, include variations of the foregoing, including constructs with two or more targeting moieties (which may be identical or may target different ligands), two or more XTEN to further increase the shielding effect and/or increase the molecular mass of the composition, two or more types of drug molecules linked to different CCD, or two or more PCM. In the some embodiments, the CCD, the XTEN, and the PCM (if present) are produced as a fusion protein, while the TM may be joined to the construct either recombinantly or by chemical conjugation. In other embodiments, the TM, the CCD, and the PCM (if present) are produced as a fusion protein, while the one or more XTEN may be joined to the construct either recombinantly or by chemical conjugation. In all cases, the drug or biologic payload is chemically conjugated to the CCD as described more fully, below.

[0193] 1. Conjugates Linked to Cytotoxic Payloads, Targeting Moieties and Peptidic Cleavage Moieties

[0194] In one aspect, the instant invention provides targeted conjugate compositions comprising a cysteine containing domain (CCD) conjugated to pharmacologically active small molecules or biologics (e.g. biologically active proteins), one or more XTEN, one or more targeting moieties (TM), and one or more peptidic cleavage sequences (PCM), either linked together recombinantly or wherein some components are conjugated to the composition. The invention contemplates a diversity of configurations for use in the subject compositions, including, but not limited to the configurations illustrated in the various schematic drawings of the disclosure. The configurations are designed to confer certain properties to the resulting compositions, including the shielding of the TM and/or the cytotoxic payload drug (non-limiting examples of which are shown in FIGS. 34, 35, 37 and 39) by the attached large XTEN component, an increased molecular weight and hydrodynamic radius that confers enhanced pharmacokinetics and reduces extravasation into normal tissues, and the subsequent reduction of molecular size and hydrodynamic radius after cleavage of the PCM, releasing the large XTEN, such that there is an enhanced ability of the released components comprising the joined TM and CCD-payload conjugates (the “released targeted composition”) to extrasavate and penetrate into the target tissue (non-limiting examples of which are shown in FIGS. 52-57), and the targeting moiety regains its full binding affinity potential (after the shielding effect of the released XTEN), thereby selectively delivering the attached payload drugs to the targeted cell to exert its pharmacologic effect. In another aspect, the design of the configurations also provides the ability to provide cost-effective methods of making combinatorial compositions of various permutations of TM and payload drugs, non-limiting examples of which are shown in FIGS. 15-17, in order to increase potency, safety, and efficacy.

[0195] In another aspect, it is an object of the invention to provide targeted conjugate compositions that have the CCD and linked drug payloads, the XTEN, and the TM with binding affinity to the target tissue, but that are lacking the PCM. It is contemplated that in applications where either penetration into the tissue is not a limiting factor (e.g., blood cancers or in diseased tissues with leaky vasculature) or in those disorders where a suitable protease is not produced, the targeted conjugate compositions without the PCM nevertheless have the ability to bind to the target tissue ligand thereby delivering the drug payload, resulting in the desired pharmacologic effect, yet still have the benefit of the enhanced pharmacokinetic properties conferred by the attached XTEN.

[0196] In yet another aspect, it is an object of the invention to provide targeted conjugate compositions that have all of the above described components but are configured to include a second, different drug payload, resulting in a bifunctional composition that can provide multiple pharmacologic effects, thereby increasing the overall therapeutic effect. Generally, such compositions will comprise two or three CCD and fused PCM and XTEN arranged in a branched or multimeric configuration, as described more fully, below.

[0197] In another aspect, it is an object of the invention to provide targeted conjugate compositions designed with configurations of multiple copies of the TM, CCD and linked payloads and XTEN such that the payloads and/or the TM are shielded by the multiple XTEN components in order to reduce or eliminate non-specific interactions with tissues or cells that are not the intended targets of the compositions, thereby reducing undesireable toxicity or side effects. It will be appreciated by those of skill in the art that the some compositions of the instant invention achieve this reduction in non-specific interactions by a combination of mechanims, which include steric hinderance by locating the TM and/or payloads proximal to the points of attachment between the bulky XTEN molecules, in that the flexible, unstructured characteristic of the long flexible XTEN polypeptides, by being tethered to the composition, are able to oscillate and move around the TM and payload components, providing a degree of blocking between the composition and tissues or cells, as well as a reduction in the ability of the intact composition to penetrate a cell or tissue due to the large molecular mass (contributed to by both the actual molecular weight of the XTEN and due to the known property of the large hydrodynamic radius of the unstructured XTEN) compared to the size of the individual TM and payload components. However, these compositions are designed such that when in proximity to a target tissue or cell bearing or secreting a protease capable of cleaving the PCM, the TM and linked payload is liberated from the bulk of the XTEN by the action of the protease(s), removing the steric hindrence barrier, and is freer to bind to and be internallized by the targeted cell and exert the pharmacologic effect of the attached payload drugs or biologics. The subject compositions fmd use in the treatment of a variety of conditions where selective delivery of a therapeutic or toxic payload to a cell, tissue or organ is desired. In one embodiment, the target tissue is a cancer, which may be a leukemia, a lymphoma, or a tumor. In another embodiment, the target tissue is an area of inflammation, which may be localized in an organ or is generalized in the subject. It is contemplated that the compositions comprising anti-inflammatory drugs or biologics can be used in treatment of diseases selected from the group consisting of acne vulgaris, asthma, autoimmune diseases, autoinflammatory diseases, celiac disease, chronic prostatitis, glomerulonephritis, hypersensitivity reaction, inflammatory bowel disease, Crohn's disease, pelvic inflammatory disease, reperfusion injury, rheumatoid arthritis, sarcoidosis, transplant rejection, vasculitis, psoriasis, fibromyalgia, irritable bowel syndrome, lupus erythematosis, osteoarthritis, scleroderma, and ulcerative colitis.

[0198] The invention contemplates a diversity of targeting moieties for use in the subject compositions, including antibodies, antibody fragments such as but not limited to scFV, and antibody mimetics including, but not limited to those set forth in Table 1, as well as peptides and synthetic molecules capable of binding ligands or receptors associated with disease or metabolic or physiologic abnormalities such as, but not limited, to folate, asparaginylglycylarginine analogs (NGR), arginylglycylaspartic acid analogs (RGD) and LHRH analogs described herein. Some of the compositions of the instant invention comprising PCM are designed with consideration of the location of the target tissue protease as well as the presence of the same protease in healthy tissues not intended to be targeted, as well as the presence of the target ligand in healthy tissue but a higher degree of presence of the ligand in unhealthy target tissue, in order to provide the widest therapeutic window (as defined by the largest difference between the minimal effective dose and the maximal tolerated dose) for the composition. To achieve the widest therapeutic window, it is specifically contemplated that some embodiments of the invention provide compositions wherein the TM of the compositions will be placed at an internal location within the composition (rather than at a terminal location) where it can be partially shielded by the XTEN that surrounds it (e.g., where the ligand is found in both healthy tissues and unhealthy target tissues but is in higher concentrations in the latter). Similarly, in order to achieve the widest therapeutic window, it is specifically contemplated that some embodiments of the invention provide compositions wherein the cytotoxic payload is either shielded by the XTEN or linked by PCM to the CCD such that the payload drugs are not released from the composition until the composition is in contact with the target tissue protease or is internalized by the target cell in order to reduce the effects of the payload on healthy tissue.

[0199] Conversely, where there is a lower degree of presence of the target ligand in healthy tissue, the invention provides configuration embodiments in which the TM will be incorporated in higher numbers in the composition or in a location less likely to be shielded by the XTEN (such as on the N- or C-terminus of the composition) such that the targeted conjugate composition can efficiently reach and be specifically accumulated in the unhealthy target tissue.

[0200] In preferred embodiments, the targeted conjugate compositions are designed such that the TM and the payload remain connected to each other after the PCM is cleaved by one or more tissue-associated proteases and is cleaved away from the XTEN of the composition, with the resulting effect that the smaller mass of the TM and the joined CCD-payload fragment (a “released targeted comosition”) is more effectively able to penetrate into the target tissue and bind to the cell ligand of the TM and then be internalized in the diseased cell in order to exert the pharmacologic effect of the payload (see FIGS. 18B, 38 and 40). In some embodiments, the targeted conjugate compositions are designed with a PCM wherein the PCM is a substrate for two or more different extracellular proteases, each capable of cleaving the composition into a fragment that comprises the TM linked to the joined CCD-payload portion that will bind to the ligand and be taken internalized in the target tissue, whereupon the payload exerts its pharmacologic effect. In some other embodiments, the targeted conjugate compositions are designed with a first and a second PCM wherein the each PCM is a substrate for a different extracellular protease that is capable of cleaving the composition into a fragment that contains the TM, or a fragment that comprises the payload, or a fragment that comprises the TM linked to a payload that will bind to the ligand and be internalized in the target tissue, whereupon the payload exerts its pharmacologic effect. The foregoing embodiments take advantage of the fact that certain diseased target tissues are capable of expressing more than one protease, and that by the selective introduction of different PCM susceptible to different proteases into the compositions, the resulting composition is more likely to be cleaved in proximity to the diseased tissue relative to healthy tissue. In such embodiments, it will be appreciated that the effects on healthy tissues would be lessened by the design of the composition wherein the TM and/or the payload is shielded by flanking XTEN or by designing the TM and/or payload components to be sterically hindered by their location within the construct until reaching the targeted tissue and the associated protease of the target tissue.

[0201] In certain embodiments, the disclosure provides targeted cleavable conjugate compositions comprising a single fusion protein having a short first portion comprising a TM, a cysteine containing domain (CCD) and a peptidic cleavage moiety (PCM) that is a substrate for one or more proteases associated with a target tissue, wherein the PCM is recombinantly linked to a longer second portion comprising an XTEN sequence, separating the construct into two regions; a first region in which the CCD and the linked drug payloads is joined to one or more molecules of a targeting moiety (e.g., either recombinantly or by conjugation) and a second region comprising the XTEN. Non-limiting examples of the resulting compositions are portrayed schematically in FIGS. 46-51. The construct can be designed to be in various configurations from the N-terminus to the C-terminus, including (TM)-(CCD)-(PCM)-(XTEN); (XTEN)-(PCM)-(CCD)-(TM); (XTEN)-(PCM)-(TM)-(CCD); and (CCD)-(TM)-(PCM)-(XTEN). In one embodiment of the foregoing, the CCD sequence exhibits at least 90%, or 91%, or 92%, or 93%, or 94%, or 95%, or 97%, or 99% identity or is identical to a sequence set forth in Table 6, the PCM is a sequence selected from the sequences set forth in Table 8, and the XTEN exhibits at least 90%, or 91%, or 92%, or 93%, or 94%, or 95%, or 96%, or 97%, or 98%, or 99% identity or is identical to a sequence set forth in Table 10. In some embodiments of the subject compositions, the one or more molecules of the TM are antibody fragments. In one embodiment, the one or more molecules of the TM are scFV derived from the antibodies set forth in Table 19 or derived from the VL and VH sequences of Table 19. In another embodiment of the targeted conjugate compositions, the one or more molecules of the TM are non-proteinaceous or are small molecule receptor ligands. In some embodiments, the one or more non-proteinaceous TM are folate. In another embodiment of the targeted conjugate compositions, the one or more molecules of the TM are LHRH (including the analogs of Table 22). In another embodiment of the targeted conjugate compositions, the one or more molecules of the TM are RGD or RGD analogs or NGD or NGD analogs. In another embodiment of the targeted conjugate composition, the drug payloads are selected from the group of payloads of Tables 14-17. In another embodiment of the of the targeted conjugate compositions, the compositions comprise two different payloads wherein each is selected from the group of payloads of Tables 14-17. In another embodiment, the payloads are biologically active proteins, such as proteins selected from the group of payload of Table 16. In other embodiments, the payloads of the targeted compositions are cytotoxic drugs and are selected from the group consisting of doxorubicin, nemorubicin, PNU-159682, paclitaxel, docetaxel, auristatin E, auristatin F, dolastatin 10, dolastatin 15, monomethyl auristatin E (MMAE), monomethyl auristatin F (MMAF), monomethyl auristatin D (MMAD), maytansine, mertansine (DM1), maytansinoid DM4, calicheamicin, N-acetyl-calicheamicin, vinblastine, vincristine, vindesine, vinorelbine, camptothecin, topotecan, irinotecan, SN-38, duocarmycin A, duocarmycin B1, duocarmycin B2, duocarmycin C1, duocarmycin C2, duocarmycin D, duocarmycin SA, duocarmycin TM, duocarmycin MB, duocarmycin DM, mitomycin C, rachelmycin, epothilone A, epothilone B, epothilone C, tubulysin B, tubulysin M, pyrrolobenzodiazepine (PBD), bortezomib, hTNF, I1-12, ranpirnase, and Pseudomonas exotoxin A. In one embodiment of the foregoing, the cytotoxic payload is MMAF. In another embodiment of the foregoing, the cytotoxic payload is maytansine. In another embodiment of the foregoing, the cytotoxic payload is paclitaxel. In another embodiment of the foregoing, the cytotoxic payload is Pseudomonas exotoxin. In another embodiment of the foregoing, the cytotoxic payload is MMAE. In another embodiment of the foregoing, the cytotoxic payload is mertansine (DM1). In other embodiments, the targeted conjugate composition comprise two different cytotoxic drugs selected from the group consisting of doxorubicin, nemorubicin, PNU-159682, paclitaxel, docetaxel, auristatin E, auristatin F, dolastatin 10, dolastatin 15, monomethyl auristatin E (MMAE), monomethyl auristatin F (MMAF), monomethyl auristatin D (MMAD), maytansine, mertansine (DM1), maytansinoid DM4, calicheamicin, N-acetyl-calicheamicin, vinblastine, vincristine, vindesine, vinorelbine, camptothecin, topotecan, irinotecan, SN-38, duocarmycin A, duocarmycin B1, duocarmycin B2, duocarmycin C1, duocarmycin C2, duocarmycin D, duocarmycin SA, duocarmycin TM, duocarmycin MB, duocarmycin DM, mitomycin C, rachelmycin, epothilone A, epothilone B, epothilone C, tubulysin B, tubulysin M, pyrrolobenzodiazepine (PBD), bortezomib, hTNF, I1-12, ranpirnase, and Pseudomonas exotoxin A.

[0202] In one embodiment of the targeted conjugate composition, the peptidic cleavage moiety (PCM) of the composition is selected from the group of sequences set forth in Table 8. It is specifically contemplated that the PCM of a given compositions have a sequence that is a substrate for one or more proteases associated with a tissue wherein an antigen, marker or receptor on said tissue is also a ligand for the TM of that composition. In such embodiments, the binding of the TM to the ligand brings the targeted conjugate composition into proximity with the tissue-associated protease whereupon the composition is cleaved, thereby releasing the cytotoxic payloads proximal to or within said tissue, resulting in a pharmacologic effect of the drug component. In one embodiment, wherein the drug is a cytotoxic drug, the targeted conjugate composition exhibits at least about 2-fold, or 3-fold, or 4-fold, or 5-fold, or 6-fold, or 7-fold, or 8-fold, or 9-fold, or 10-fold, or 20-fold, or 30-fold, or 40-fold, or 50-fold, or 100-fold greater toxicity in an in vitro mammalian cell cytotoxicity assay with a cell line comprising said tissue ligand compared to the toxicity of the composition when the cell line does not comprise said tissue ligand. In another embodiment, the composition exhibits at least about 2-fold, or 3-fold, or 4-fold, or 5-fold, or 6-fold, or 7-fold, or 8-fold, or 9-fold, or 10-fold, or 20-fold, or 30-fold, or 40-fold, or 50-fold, or 100-fold greater toxicity in an in vitro mammalian cell cytotoxicity assay with a cell line comprising the tissue ligand and in which the target tissue-associated protease is present, compared to the toxicity of the composition when the assay does not have the protease. In another embodiment, the targeted conjugate composition exhibits at least about 2-fold, or 3-fold, or 4-fold, or 5-fold, or 6-fold, or 7-fold, or 8-fold, or 9-fold, or 10-fold, or 20-fold, or 30-fold, or 40-fold, or 50-fold, or 100-fold greater toxicity in an in vitro mammalian cell cytotoxicity assay wherein the PCM is cleaved compared to the toxicity of the composition when PCM is not cleaved. In another embodiment, the released targeted composition comprising the TM and theCCD comprising the cytotoxic compound(s) that is cleaved and released from the composition is internalized into a target cell in an in vitro mammalian cell cytotoxicity assay at a concentration that is least about 2-fold, or 3-fold, or 4-fold, or 5-fold, or 6-fold, or 7-fold, or 8-fold, or 9-fold, or 10-fold, or 20-fold, or 30-fold, or 40-fold, or 50-fold, or 100-fold greater compared the intact composition that is not cleaved. In another embodiment, the intact targeted conjugate composition exhibits a terminal half-life when administered to a subject that is 10-fold, or 20-fold, or 30-fold, or 40-fold, or 50-fold, or 100-fold longer compared to the cytotoxic drug not linked to the composition and administered in a comparable fashion to a subject. In another embodiment, the targeted conjugate composition exhibits a terminal half-life of at least about 3 days, or at least about 7 days, or at least about 10 days, or at least about 14 days, or at least about 21 days, or at least about 30 days when administered to a subject.

[0203] In another aspect, the invention provides multiple targeted conjugate compositions that are conjugated to an XTEN backbone having cysteine residues (e.g., a sequence of Table 11). Non-limiting examples of the various configurations of the resulting compositions are portrayed schematically in FIGS. 37-40, 49 and 50. In one embodiment, the composition comprises a first XTEN comprising cysteine residues, serving as a “backbone” wherein one or more fusion proteins are linked to the cysteines of the backbone XTEN that comprise, in order, a PCM fused or conjugated to a targeting moiety and a CCD bearing drug payloads (see FIG. 37). In another configuration of the foregoing embodiment, the fusion protein further comprises another PCM and an XTEN attached to the C-terminus of the CCD of each of the fusion proteins attached to the backbone XTEN. In another embodiment, the composition comprises a first XTEN comprising cysteine residues wherein a targeting moiety is recombinantly fused or linked by conjugation to the N-or C-terminus of the XTEN, serving as a “backbone” wherein one or more fusion proteins are linked to the cysteines of the backbone XTEN that comprise, in order, a PCM fused or conjugated to a targeting moiety and a CCD bearing drug payloads (see FIG. 39). In another configuration of the foregoing embodiment, the fusion protein further comprises another PCM and an XTEN attached to the C-terminus of the CCD of each of the fusion proteins attached to the backbone XTEN. In the foregoing compositions, the first XTEN exhibits at least 90%, or 91%, or 92%, or 93%, or 94%, or 95%, or 96%, or 97%, or 98%, or 99% or is identical to a sequence selected from the XTEN sequences of Table 11. In another embodiment of the foregoing targeted conjugate composition, the XTEN of the one or more side fusion proteins exhibits at least 90%, or 91%, or 92%, or 93%, or 94%, or 95%, or 96%, or 97%, or 98%, or 99% identity or is identical to a sequence selected from the XTEN sequences of Table 10. In the foregoing embodiment, the composition comprises at least two, or at least three, or at least four, or at least five, or at least six, or at least seven, or at least eight, or at least nine of the fusion proteins comprising the TM, PCM and CCD and conjugated drug molecules, wherein the side fusion proteins are linked to the thiol of the XTEN cysteine residues using cross-linkers described hererin, below. In one embodiment of the composition, the one or more molecules of the TM are antibody fragments, such as an scFv derived from the antibodies or the VL and VH of Table 19. In another embodiment, the one or more TM molecules of the TM are non-proteinaceous or are other small molecule receptor ligands. In some embodiments, the one or more non-proteinaceous TM are folate. In another embodiment, the one or more TM molecules are LHRH. In another embodiment of the targeted conjugate composition, the one or more cytotoxic payloads that are conjugated to cysteine residues of the fusion protein CCD are identical and are selected from the group of payloads of Table 15. In another embodiment of the targeted conjugate composition, the one or more cytotoxic payloads that are conjugated to cysteine residues of the fusion protein CCD are identical and are selected from the group consisting of doxorubicin, nemorubicin, PNU-159682, paclitaxel, docetaxel, auristatin E, auristatin F, dolastatin 10, dolastatin 15, monomethyl auristatin E (MMAE), monomethyl auristatin F (MMAF), monomethyl auristatin D (MMAD), maytansine, mertansine (DM1), maytansinoid DM4, calicheamicin, N-acetyl-calicheamicin, vinblastine, vincristine, vindesine, vinorelbine, camptothecin, topotecan, irinotecan, SN-38, duocarmycin A, duocarmycin B1, duocarmycin B2, duocarmycin C1, duocarmycin C2, duocarmycin D, duocarmycin SA, duocarmycin TM, duocarmycin MB, duocarmycin DM, mitomycin C, rachelmycin, epothilone A, epothilone B, epothilone C, tubulysin B, tubulysin M, pyrrolobenzodiazepine (PBD), bortezomib, hTNF, I1-12, ranpirnase, and Pseudomonas exotoxin A. In one embodiment of the foregoing, the cytoxic payload is doxirubicin. In another embodiment of the foregoing, the cytotoxic payload is MMAE. In another embodiment of the foregoing, the cytotoxic payload is MMAF. In another embodiment of the foregoing, the cytotoxic payload is maytansine. In another embodiment of the foregoing, the cytotoxic payload is paclitaxel. In another embodiment of the foregoing, the cytotoxic payload is Pseudomonas exotoxin. In another embodiment of the foregoing, the cytotoxic payload is mertansine (DM1). In other embodiments, the targeted conjugate composition comprise two different cytotoxic drugs that are conjugated to the CCD cysteine residues of separate fusion proteins that are subsequently conjugated to the backbone XTEN, wherein each cytotoxic drug is selected from the group consisting of doxorubicin, nemorubicin, PNU-159682, paclitaxel, docetaxel, auristatin E, auristatin F, dolastatin 10, dolastatin 15, monomethyl auristatin E (MMAE), monomethyl auristatin F (MMAF), monomethyl auristatin D (MMAD), maytansine, mertansine (DM1), maytansinoid DM4, calicheamicin, N-acetyl-calicheamicin, vinblastine, vincristine, vindesine, vinorelbine, camptothecin, topotecan, irinotecan, SN-38, duocarmycin A, duocarmycin B1, duocarmycin B2, duocarmycin C1, duocarmycin C2, duocarmycin D, duocarmycin SA, duocarmycin TM, duocarmycin MB, duocarmycin DM, mitomycin C, rachelmycin, epothilone A, epothilone B, epothilone C, tubulysin B, tubulysin M, pyrrolobenzodiazepine (PBD), bortezomib, hTNF, I1-12, ranpirnase, and Pseudomonas exotoxin A.

[0204] In one embodiment of the targeted conjugate composition, the peptidic cleavage moiety (PCM) is selected from the group of sequences set forth in Table 8. In another embodiment of the targeted conjugate composition, the PCM of the composition is a substrate for protease associated with a tissue wherein an antigen, marker or receptor on said tissue is also a ligand for the TM of the composition. In such embodiments, the binding of the TM to the ligand brings the targeted conjugate composition bearing the cytotoxic drug or biologic into proximity with the tissue-associated protease whereupon the composition is cleaved, thereby releasing the components comprising the cytotoxic payloads proximal to the tissue such that the smaller molecular mass is capble of being internalized within said tissue, resulting in a pharmacologic effect know in the art for the cytoxic component. In one embodiment, the targeted conjugate composition exhibits at least about 2-fold, or 3-fold, or 4-fold, or 5-fold, or 6-fold, or 7-fold, or 8-fold, or 9-fold, or 10-fold, or 20-fold, or 30-fold, or 40-fold, or 50-fold, or 100-fold greater toxicity in an in vitro mammalian cell cytotoxicity assay with a cell line comprising said tissue ligand compared to the toxicity of the composition when the cell line does not comprise said tissue ligand. In another embodiment, the composition exhibits at least about 2-fold, or 3-fold, or 4-fold, or 5-fold, or 6-fold, or 7-fold, or 8-fold, or 9-fold, or 10-fold, or 20-fold, or 30-fold, or 40-fold, or 50-fold, or 100-fold greater toxicity in an in vitro mammalian cell cytotoxicity assay with a target tissue-associated protease present compared to the toxicity of the composition when the assay does not comprise said target tissue-associated protease. In another embodiment, the composition exhibits at least about 2-fold, or 3-fold, or 4-fold, or 5-fold, or 6-fold, or 7-fold, or 8-fold, or 9-fold, or 10-fold, or 20-fold, or 30-fold, or 40-fold, or 50-fold, or 100-fold greater toxicity in an in vitro mammalian cell cytotoxicity assay wherein the PCM is cleaved compared to the toxicity of the composition when PCM is not cleaved. In another embodiment, the targeted conjugate composition TM-CCD fragment comprising the cytotoxic compound(s) (the released targeted composition) that is cleaved and released from the composition is internalized into a target cell in an in vitro mammalian cell cytotoxicity assay at a concentration that is least about 2-fold, or 3-fold, or 4-fold, or 5-fold, or 6-fold, or 7-fold, or 8-fold, or 9-fold, or 10-fold, or 20-fold, or 30-fold, or 40-fold, or 50-fold, or 100-fold greater compared the intact composition. In another embodiment, the targeted conjugate composition exhibits a terminal half-life when administered to a subject that is 10-fold, or 20-fold, or 30-fold, or 40-fold, or 50-fold, or 100-fold longer compared to the corresponding cytotoxic drug not linked to the targeted conjugate composition and administered in a comparable fashion to a subject. In another embodiment, the targeted conjugate composition exhibits a terminal half-life of at least about 3 days, or at least about 7 days, or at least about 10 days, or at least about 14 days, or at least about 21 days, or at least about 30 days when administered to a subject. In another embodiment, the invention provides a targeted conjugate composition that when administered to a subject is cleaved by a protease colocalized with the target tissue, releasing the TM-CCD fragment comprising the cytotoxic compound(s) (the released targeted composition), and the released targeted composition is internalized into the target tissue bearing the ligand to a concentration that is least about 2-fold, or 3-fold, or 4-fold, or 5-fold, or 6-fold, or 7-fold, or 8-fold, or 9-fold, or 10-fold, or 20-fold, or 30-fold, or 40-fold, or 50-fold, or 100-fold greater compared the intact composition. In another embodiment, the targeted conjugate composition exhibits a terminal half-life when administered to a subject that is 10-fold, or 20-fold, or 30-fold, or 40-fold, or 50-fold, or 100-fold longer compared to the corresponding cytotoxic drug not linked to the targeted conjugate composition and administered in a comparable fashion to a subject. In another embodiment, the targeted conjugate composition exhibits a terminal half-life of at least about 3 days, or at least about 7 days, or at least about 10 days, or at least about 14 days, or at least about 21 days, or at least about 30 days when administered to a subject.

[0205] In another aspect, the invention provides targeted conjugate compositions comprising a first and a second region wherein each region is linked at its N-terminus to a peptidic cleavage moiety (PCM) that is a substrate for a protease associated with a tissue, with the PCM separating the composition into two regions; a first region in which a CCD fused to an unmodified XTEN that exhibits at least 90%, or 91%, or 92%, or 93%, or 94%, or 95%, or 96%, or 97%, or 98%, or 99% identity or is identical to a sequence selected from the XTEN sequences of Table 10, and a second region comprising a CCD fused to a second unmodified XTEN in which the XTEN exhibits at least 90%, or 91%, or 92%, or 93%, or 94%, or 95%, or 96%, or 97%, or 98%, or 99% identity or is identical to a sequence selected from the XTEN sequences of Table 10 wherein the second CCD further comprises one or more cytotoxic payloads that are conjugated to the cysteine residues of the second CCD, and wherein the composition further comprises one or more targeting moieties (TM) conjugated to cysteine residue(s) of the first CCD. Non-limiting examples of the resulting compositions are portrayed schematically in FIGS. 34 and 35. In one embodiment of the foregoing compositions of this paragraph, the TM conjugated to the PCM is a scFv derived from the group of antibodies or are scFv derived from the VL and VH of the antibodies of Table 19. In another embodiment of the foregoing, the TM conjugated to the second CCD is non-proteinaceous or are small molecule receptor ligands. In some embodiments, the one or more non-proteinaceous TM are folate. In yet another embodiment of the foregoing, the TM conjugated to the second CCD is an LHRH analog described herein. In one embodiment of the foregoing compositions, the peptidic cleavage moiety (PCM) is selected from the group of sequences set forth in Table 8. In another embodiment of the foregoing compositions, the PCM of the composition is a substrate for protease associated with a tissue wherein an antigen, marker or receptor on said tissue is also a ligand for the TM of the composition. In another embodiment of the foregoing compositions, the one or more cytotoxic payloads conjugated to the first CCD are identical and are selected from the group of payloads of Table 15. In another embodiment of the foregoing compositions of this paragraph, the one or more cytotoxic payloads conjugated to the first CCD are identical and are selected from the group consisting of doxorubicin, nemorubicin, PNU-159682, paclitaxel, docetaxel, auristatin E, auristatin F, dolastatin 10, dolastatin 15, monomethyl auristatin E (MMAE), monomethyl auristatin F (MMAF), monomethyl auristatin D (MMAD), maytansine, mertansine (DM1), maytansinoid DM4, calicheamicin, N-acetyl-calicheamicin, vinblastine, vincristine, vindesine, vinorelbine, camptothecin, topotecan, irinotecan, SN-38, duocarmycin A, duocarmycin B1, duocarmycin B2, duocarmycin C1, duocarmycin C2, duocarmycin D, duocarmycin SA, duocarmycin TM, duocarmycin MB, duocarmycin DM, mitomycin C, rachelmycin, epothilone A, epothilone B, epothilone C, tubulysin B, tubulysin M, pyrrolobenzodiazepine (PBD), bortezomib, hTNF, I1-12, ranpirnase, and Pseudomonas exotoxin A. In another embodiment of the foregoing, the cytotoxic payload is MMAF. In another embodiment of the foregoing, the cytotoxic payload is maytansine. In another embodiment of the foregoing, the cytotoxic payload is paclitaxel. In another embodiment of the foregoing, the cytotoxic payload is Pseudomonas exotoxin. In another embodiment of the foregoing, the cytotoxic payload is MMAE. In other embodiments of the foregoing compositions of this paragraph, the composition comprises two different cytotoxic drugs selected from the group consisting of doxorubicin, nemorubicin, PNU-159682, paclitaxel, docetaxel, auristatin E, auristatin F, dolastatin 10, dolastatin 15, monomethyl auristatin E (MMAE), monomethyl auristatin F (MMAF), monomethyl auristatin D (MMAD), maytansine, mertansine (DM1), maytansinoid DM4, calicheamicin, N-acetyl-calicheamicin, vinblastine, vincristine, vindesine, vinorelbine, camptothecin, topotecan, irinotecan, SN-38, duocarmycin A, duocarmycin B1, duocarmycin B2, duocarmycin C1, duocarmycin C2, duocarmycin D, duocarmycin SA, duocarmycin TM, duocarmycin MB, duocarmycin DM, mitomycin C, rachelmycin, epothilone A, epothilone B, epothilone C, tubulysin B, tubulysin M, pyrrolobenzodiazepine (PBD), bortezomib, hTNF, I1-12, ranpirnase, and Pseudomonas exotoxin A in which one drug is linked to the first CCD and the second drug is linked to the second CCD and the TM is fused to the terminal ends of the construct. In such embodiments, the binding of the TM to the ligand brings the composition into proximity with the tissue-associated protease whereupon the PCM of the composition is cleaved, thereby releasing the CCD comprising the cytotoxic payloads proximal to or that are internalized within said tissue, resulting in a pharmacologic effect know in the art for the cytoxic component. In this embodiment, the cleaved composition exhibits at least about 2-fold, or 3-fold, or 4-fold, or 5-fold, or 6-fold, or 7-fold, or 8-fold, or 9-fold, or 10-fold, or 20-fold, or 30-fold, or 40-fold, or 50-fold, or 100-fold greater toxicity in an in vitro mammalian cell cytotoxicity assay with a cell line comprising said tissue ligand compared to the toxicity of the composition when the cell line does not comprise said tissue ligand. In another embodiment, this composition exhibits at least about 2-fold, or 3-fold, or 4-fold, or 5-fold, or 6-fold, or 7-fold, or 8-fold, or 9-fold, or 10-fold, or 20-fold, or 30-fold, or 40-fold, or 50-fold, or 100-fold greater toxicity in an in vitro mammalian cell cytotoxicity assay with a cell line comprising said tissue ligand and in the presenece of the tissue-associated protease compared to the toxicity of the composition when cell line does not comprise said tissue ligand and the tissue-associated protease. Additionally, the composition exhibits at least about 2-fold, or 3-fold, or 4-fold, or 5-fold, or 6-fold, or 7-fold, or 8-fold, or 9-fold, or 10-fold, or 20-fold, or 30-fold, or 40-fold, or 50-fold, or 100-fold greater toxicity in an in vitro mammalian cell cytotoxicity assay wherein the PCM is cleaved compared to the toxicity of the composition when PCM is not cleaved. As a result of the presences of the XTEN fused to the composition, the composition exhibits a terminal half-life when administered to a subject that is 10-fold, or 20-fold, or 30-fold, or 40-fold, or 50-fold, or 100-fold longer compared to the corresponding cytotoxic drug not linked to the composition and administered in a comparable fashion to a subject. In the embodiment, the composition exhibits a terminal half-life of at least about 3 days, or at least about 7 days, or at least about 10 days, or at least about 14 days, or at least about 21 days, or at least about 30 days when administered to a subject.

[0206] In another aspect, the invention provides targeted conjugate compositions comprising at least one targeting moiety directed to a target selected from the group consisting of the targets set forth in Tables 2, 3, 4, 19 and 19 fused to the fusion proteins comprising a CCD, a PCM, and an XTEN wherein the composition further comprises one or more molecules of a cytotoxic payload conjugated to the cysteine residues of the CCD. In one embodiment of the composition, the TM is an scFV derived from the antibodies or the VL and VH sequences of Table 19. In another embodiment, the TM is folate, which is conjugated to the N- or C-terminus of the CCD In another embodiment, the TM is LHRH conjugated to the N- or C-terminus of the CCD. In the foregoing compositions, the cytotoxic payload molecules are identical and are selected from the group of payloads of Tables 14-17. In another embodiment of the foregoing compositions, the one or more cytotoxic payloads are identical and are selected from the group consisting of doxorubicin, nemorubicin, PNU-159682, paclitaxel, docetaxel, auristatin E, auristatin F, dolastatin 10, dolastatin 15, monomethyl auristatin E (MMAE), monomethyl auristatin F (MMAF), monomethyl auristatin D (MMAD), maytansine, mertansine (DM1), maytansinoid DM4, calicheamicin, N-acetyl-calicheamicin, vinblastine, vincristine, vindesine, vinorelbine, camptothecin, topotecan, irinotecan, SN-38, duocarmycin A, duocarmycin B1, duocarmycin B2, duocarmycin C1, duocarmycin C2, duocarmycin D, duocarmycin SA, duocarmycin TM, duocarmycin MB, duocarmycin DM, mitomycin C, rachelmycin, epothilone A, epothilone B, epothilone C, tubulysin B, tubulysin M, pyrrolobenzodiazepine (PBD), bortezomib, hTNF, I1-12, ranpirnase, and Pseudomonas exotoxin A.

[0207] In other embodiments, the targeted conjugate compositions comprise two different cytotoxic drugs selected from the group consisting of doxorubicin, nemorubicin, PNU-159682, paclitaxel, docetaxel, auristatin E, auristatin F, dolastatin 10, dolastatin 15, monomethyl auristatin E (MMAE), monomethyl auristatin F (MMAF), monomethyl auristatin D (MMAD), maytansine, mertansine (DM1), maytansinoid DM4, calicheamicin, N-acetyl-calicheamicin, vinblastine, vincristine, vindesine, vinorelbine, camptothecin, topotecan, irinotecan, SN-38, duocarmycin A, duocarmycin B1, duocarmycin B2, duocarmycin C1, duocarmycin C2, duocarmycin D, duocarmycin SA, duocarmycin TM, duocarmycin MB, duocarmycin DM, mitomycin C, rachelmycin, epothilone A, epothilone B, epothilone C, tubulysin B, tubulysin M, pyrrolobenzodiazepine (PBD), bortezomib, hTNF, I1-12, ranpirnase, and Pseudomonas exotoxin A in which each type of cytotoxic drug is conjugated to a different CCD of the fusion protein such that each CCD of a given composotion comprises only identical cytotoxic drugs.

[0208] As illustrated in FIGS. 34-37, 41, 42 and 46-51, the subject targeted conjugate compositions can have different valencies, with one, two, three, or four or more fusion protein molecules linked to one or more targeting moieties. Accordingly, a targetedconjugate composition can comprise 1, 2, 3, or 4 or more fusion proteins comprising CCD with linked payloads and targeting moieties.

TABLE 1
Targeting Moieties: Antibody fragments, scaffolds and mimetics
Targeting Moieties

ABDURINS
AdNectins/Fibronectin type III domain
Adnexins/Fibronectin
Affibodies/Protein Z
Affilins
AFFINILUTE
AFFINIMIP
AFIM
Anticalins/Lipocalins
Aptabody
Aptamers
Armadillo repeat proteins
Avimers
Azymetric
Bispecific diabodies
BiTEs
Bivalent diabodies
Centyrins
DARPins/Ankyrin repeat proteins
Diabodies
Domain antibodies/dAbs/human Vh
Engineered affinity proteins
Evibodies
Fabs
Fv
Fynomers
Glubody
Im7/ColE7 immunity protein
iMabs
Knottin/Cysteine-knot miniproteins
Kunitz domains
Maxibodies
Microbodies
Minibodies
Molecular imprinted polymers (MIPs)
Monobodies
Monoclonal antibodies
Monoclonal T cell receptors (mTCR)
MonoLex
Nanobodies
Nanofitins
Phylomers
Single chain variable fragment (scFv)
Single chain Fab (scFab) fragment
Shark Vhh
SMIPs
SOMAmers
Stable scFV
Spiegelmers
Synbodies
TandAbs ®
Telobodies
Tetrabodies
Tetranectins
Tetravalent bispecific antibodies
Trans-body
Triabodies

TABLE 2
Exemplary targets and targeting
moieties to which conjugate compositions
can be directed

| Class | Target | Targeting Moiety |
|---|---|---|
| Peptide | LHRHR | LHRH & analogues (e.g. D-Lys-(6)-LHRH) |
| | CD13, Aminopeptidase | NGR class (e.g. CNGRC (SEQ ID NO: 5), CNGRCG |
| | | (SEQ ID NO: 6), GNGRG (SEQ ID NO: 7), KNGRE |
| | | (SEQ ID NO: 8), (GNGRG)2KGK (core peptide |
| | | disclosed as SEQ ID NO: 9), CVLNGRMEC (SEQ ID |
| | | NO: 10), NGRAHA (SEQ ID NO: 11), |
| | | CNGRCVSGCAGRC (SEQ ID NO: 12)) |
| | Folate receptor | Folate & analogue (e.g. γ-folate, α-folate; pteroate-gly) |
| | Integrin | Cilengitide; RGD-4C; iRGD |
| | LRP receptor | Angiopep-2 |
| | Somatostatin receptor | Somatostatin & analogues (e.g. octreotide; pasireotide; |
| | | lanreotide; vapreotide, JF-07-69) |
| | Nucleolin | F3 peptide |
| | PDGFR-beta | RGR |
| | LyP-1 receptor | LyP-1; CGNKRTRGC (SEQ ID NO: 13) |
| | Chondroitin sulfate | TAASGVRSMH (SEQ ID NO: 14); LTLRWVGLMS |
| | proteoglygan NG2 | (SEQ ID NO: 15) |
| | VPAC1 and VPAC2 | Vasoactive intestinal peptide |
| | CCK1 and CCK2 | Cholecystokinin |
| | Gastrin receptor, CCK1 & | Gastrin |
| | CCK2 | |
| | GRP receptor subtype | Gastrin-releasing peptide |
| | Neurotensin receptor | Neurotensin |
| | Alpha-MSH receptor | Alpha-melanocyte stimulating hormone |
| | Oxytocin receptor | Oxytocin |
| | Lymphatic vessels | LyP-2; CNRRTKAGC (SEQ ID NO: 16) |
| | Lymphatic vessels | LSD; CLSDGKRKC (SEQ ID NO: 17) |
| | Lymphatic vessels | REA; CREAGRKAC (SEQ ID NO: 18) |
| | Lymphatic vessels | AGR, CAGRRSAYC (SEQ ID NO: 19) |
| | Pericytes & endothelia | RSR; CRSRKG (SEQ ID NO: 20) |
| | cells | |
| | Pericytes & endothelia | KAA; CKAAKNK (SEQ ID NO: 21) |
| | cells | |
| | Blood vessels | CSRPRRSEC (SEQ ID NO: 22) |
| | Angiogenic blood vessels | KRK; CGKRK (SEQ ID NO: 23) |
| | & tumor cells | |
| | Angiogenic blood vessels | CDTRL (SEQ ID NO: 24) |
| | Angiogenic blood vessels | CGTKRKC (SEQ ID NO: 25) |
| | & tumor cells | |
| Protein | DR4, DR5 | TRAIL |
| Antibody- | Various | DARPINS |
| like scaffold | Various | Centyrins |
| Antibody | Lewis-Y-related antigen | Br96; anti-Lewis-Y-related antigen antibody |
| | Her2 | Trastuzumab; Pertuzumab; anti-HER2 antibody |
| | EGFR | Cetuximab; anti-EGFR antibody |
| | Nectin-4 | anti-nectin-4 antibody |
| | CanAg (mucin-type | huC242, anti-CanAg antibody |
| | glycoprotein) | |
| | CD138 | anti-CD138 antibody |
| | CD19 | MDX-1342; MOR-208; HuB4; anti-CD19 antibody |
| | CD22 | Epratuzumab; Bectumomab; Inotuzumab; |
| | | Moxetumomab, RFB4; anti-CD22 antibody |
| | CD23 | Lumiliximab, anti-CD23 antibody |
| | CD25 (IL-2 receptor) | Daclizumab, anti-CD25 antibody |
| | CD30 | Xmab2513; cAC10; MDX-060; anti-CD30 antibody |
| | CD33 | Gemtuzumab; HuM195; huMy9-6; anti-CD33 antibody |
| | CD38 | Daratumumab, anti-CD38 antibody |
| | CD40 | SGN-40; HCD122; anti-CD40 antibody |
| | CD56 | huN901; anti-CD56 antibody |
| | CD70 | MDX-1411; anti-CD70 antibody |
| | CD74 | Milatuzumab; anti-CD74 antibody |
| | CD79b | anti-CD79b antibody |
| | CD80 | Galiximab; anti-CD80 antibody |
| | Carcinoembryonic antigen | Lapetuzumab, hCOL-1anti-CEA antibody |
| | (CEA) | |
| | Cripto | anti-Cripto antibody |
| | cMET | CE-355621, DN30, MetMAb; antagonist anti-cMET antibody |
| | EpCAM | Adecatumumab; Edrecolomab; Catumaxomab; anti-EpCAM antibody |
| | EphA2 | 1C1, anti-EphA2 antibody |
| | GPNMB (human | glembatumumab, anti-GPNMB antibody |
| | gylcoprotein NMB | |
| | (osteoactivin)) | |
| | Integrins | anti-integrin antibody |
| | MUC-1 (epitope CA6) | anti-MUC-1 antibody |
| | PSMA | MDX-070, MLN591, anti-PSMA antibody |
| | TGFa | anti-TGFa antibody |
| | TIM1 | anti-TIM1 antibody |
| | Folate receptor 1 | M9346A, Farletuzumab, anti-folate receptor antibody |
| | IL-13 receptor | anti-IL-13 receptor antibody |

[0209] Additional targets contemplated for which the targeting moieties of the subject targeted conjugate compositions of the invention can be directed include tumor-associated antigens listed in Table 3. In one embodiment, the invention provides targeted conjugate compositions comprising one or more targeting components capable of binding one or more of the tumor associated antigens of Table 3 and the cancer target ligands of Table 2, Table 4, or Table 19.

TABLE 3
Tumor-associated antigen targets

| TAA targets (synonyms) | Accession Number and References |
|---|---|
| Her2 (ErbB2) | GenBank accession no. M11730; U.S. Pat. No. 5,869,445; |
| | WO2004048938; WO2004027049; WO2004009622; |
| | WO2003081210; WO2003089904; WO2003016475; |
| | US2003118592; WO2003008537; WO2003055439; |
| | WO2003025228; WO200222636; WO200212341; |
| | WO200213847; WO200214503; WO200153463; |
| | WO200141787; WO200044899; WO200020579; |
| | WO9630514; EP1439393; WO2004043361; |
| | WO2004022709; WO200100244 |
| BMPR1B (bone morphogenetic | GenBank accession no. NM_001203; WO2004063362; |
| protein receptor-type IB) | WO2003042661; US 2003134790; WO2002102235; |
| | WO2003055443; WO200299122; WO2003029421; |
| | WO2003024392; WO200298358' WO200254940; |
| | WO200259377; WO200230268 |
| E16 (LAT1, SLC7A5) | GenBank accession no. NM_003486); WO2004048938; |
| | WO2004032842; WO2003042661; WO2003016475; |
| | WO200278524; WO200299074; WO200286443; |
| | WO2003003906; WO200264798; WO200014228; |
| | US2003224454; WO2003025138 |
| STEAP1 (six transmembrane | GenBank accession no. NM_012449; WO2004065577; |
| epithelial antigen of prostate) | WO2004027049; EP1394274; WO2004016225; |
| | WO2003042661; US2003157089; US2003185830; |
| | US2003064397; WO200289747618; WO2003022995 |
| STEAP2 (six transmembrane | GenBank accession no. AF455138; WO2003087306; |
| epithelial antigen of prostate 2) | US2003064397; WO200272596; WO200172962; |
| | WO2003104270; WO2003104270; US2004005598; |
| | WO2003042661; US2003060612; WO200226822; |
| | WO200216429 |
| CA125/0772P (MUC16) | GenBank accession no. AF361486; WO2004045553; |
| | WO200292836; WO200283866; US2003124140 |
| megakaryocyte potentiating factor | GenBank accession no. NM_005823; WO2003101283; |
| (MPF, mesothelin) | WO2002102235; WO2002101075; WO200271928; |
| | WO9410312 |
| Na/Pi cotransporter type IIb (NaPi3b) | GenBank accession no. NM_006424; WO2004022778; |
| | EP1394274; WO2002102235; EP875569; WO200157188; |
| | WO2004032842; WO200175177 |
| Semaphorin 5b (SEMA5B, SEMAG) | GenBank accession no. AB040878; WO2004000997; |
| | WO2003003984; WO200206339; WO200188133; |
| | WO2003054152; WO2003101400 |
| Prostate cancer stem cell antigen | GenBank accession no. AY358628; US2003129192; |
| (PSCA hlg) | US2004044180; US2004044179; US2003096961; |
| | US2003232056; WO2003105758; US2003206918; |
| | EP1347046; WO2003025148 |
| ETBR (Endothelin type B receptor) | GenBank accession no. AY275463; WO2004045516; |
| | WO2004048938; WO2004040000; WO2003087768; |
| | WO2003016475; WO2003016475; WO200261087; |
| | WO2003016494; WO2003025138; WO200198351; |
| | EP522868; WO200177172; US2003109676; U.S. Pat. No. |
| | 6,518,404; U.S. Pat. No. 5,773,223; WO2004001004 |
| TRPV4 (Transient receptor potential | U.S. patent application No. 20090208514 |
| cation channel, subfamily V) | |
| CDC45L | GenBank Accession NO. AJ223728; U.S. patent application No. |
| | 20090208514 |
| CRIPTO (CR, CR1, CRGF) | GenBank accession no. NP_003203 or NM_003212; |
| | US2003224411; WO2003083041; WO2003034984; |
| | WO200288170; WO2003024392; WO200216413; |
| | WO200222808; U.S. Pat. No. 5,854,399; U.S. Pat. No. 5,792,616 |
| CD21 (CR2 (Complement receptor 2) | GenBank accession no. M26004; WO2004045520; |
| or C3DR (C3d/Epstein Barr virus | US2004005538; WO2003062401; WO2004045520; |
| receptor) | WO9102536; WO2004020595 |
| CD79b (CD79B, CD79β, IGb | GenBank accession no. NM_000626 or 11038674; |
| (immunoglobulin-associated beta), | WO2004016225; WO2003087768; US2004101874; |
| B29) | WO2003062401; WO200278524; US2002150573; U.S. Pat. |
| | No. 5,644,033; WO2003048202; WO 99/558658, U.S. Pat. |
| | No. 6,534,482; WO200055351 |
| FcRH2 (IFGP4, IRTA4, SPAP1A | GenBank accession no. NM_030764, AY358130; |
| (SH2 domain containing phosphatase | WO2004016225; WO2003077836; WO200138490; |
| anchor protein 1a), SPAP1B, | WO2003097803; WO2003089624 |
| SPAP1C) | |
| NCA (CEACAM6) | GenBank accession no. M18728; WO2004063709; |
| | EP1439393; WO2004044178; WO2004031238; |
| | WO2003042661; WO200278524; WO200286443; |
| | WO200260317 |
| MDP (DPEP1) | GenBank accession no. BC017023; WO2003016475; |
| | WO200264798 |
| IL20Rα (IL20Ra, ZCYTOR7) | GenBank accession no. AF184971; EP1394274; |
| | US2004005320; WO2003029262; WO2003002717; |
| | WO200222153; US2002042366; WO200146261; |
| | WO200146232; WO9837193 |
| BECAN (Brevican core protein) | GenBank accession no. AF229053; US2003186372; |
| | US2003186373; US2003119131; US2003119122; |
| | US2003119126; US2003119121; US2003119129; |
| | US2003119130; US2003119128; US2003119125; |
| | WO2003016475; WO200202634 |
| EphB2R (DRT, ERK, Hek5, EPHT3, | GenBank accession no. NM_004442; WO2003042661; |
| TyroS) | WO200053216; WO2004065576 (Claim 1); |
| | WO2004020583; WO2003004529; WO200053216 |
| B7h (ASLG659) | GenBank accession no. AX092328; US20040101899; |
| | WO2003104399; WO2004000221; US2003165504; |
| | US2003124140; US2003065143; WO2002102235; |
| | US2003091580; WO200210187; WO200194641; |
| | WO200202624; US2002034749; WO200206317; |
| | WO200271928; WO200202587; WO200140269; |
| | WO200036107; WO2004053079; WO2003004989; |
| | WO200271928 |
| PSCA (Prostate stem cell antigen | GenBank accession no. AJ297436; WO2004022709; |
| precursor | EP1394274; US2004018553; WO2003008537 (Claim 1); |
| | WO200281646; WO2003003906; WO200140309; |
| | US2001055751; WO200032752; WO9851805; |
| | WO9851824; WO9840403 |
| BAFF-R (B cell-activating factor | GenBank accession No. AF116456; WO2004058309; |
| receptor, BLyS receptor 3, BR3) | WO2004011611; WO2003045422; WO2003014294; |
| | WO2003035846; WO200294852; WO200238766; |
| | WO200224909 |
| CD22 (B-cell receptor CD22-β-form, | GenBank accession No. AK026467; WO2003072036 |
| BL-CAM, Lyb-8, Lyb8, SIGLEC-2, | |
| FLJ22814) | |
| CD79a (immunoglobulin-associated | GenBank accession No. NP_001774.10; WO2003088808, |
| alpha) | US20030228319; WO2003062401; US2002150573; |
| | WO9958658; WO9207574; U.S. Pat. No. 5,644,033 |
| CXCR5 (Burkitt's lymphoma receptor | GenBank accession No. NP_001707.1; WO2004040000; |
| 1) | WO2004015426; US2003105292; U.S. Pat. No. 6,555,339; |
| | WO200261087; WO200157188; WO200172830; |
| | WO200022129; WO9928468; U.S. Pat. No. 5,440,021; |
| | WO9428931; WO9217497 |
| HLA-DOB | GenBank accession No. NP_002111.1; WO9958658; U.S. |
| | Pat. No. 6,153,408; U.S. Pat. No. 5,976,551; U.S. Pat. No. |
| | 6,011,146 |
| P2X5 | GenBank accession No. NP_002552.2; WO2004047749; |
| | WO2003072035; WO200222660; WO2003093444; |
| | WO2003087768; WO2003029277 |
| CD72 (B-cell differentiation antigen | GenBank accession No. NP_001773.1; WO2004042346; |
| CD72, Lyb-2) | WO2003026493; WO200075655 |
| CD180 (LY64) | GenBank accession No. NP_005573.1; US2002193567; |
| | WO9707198; WO2003083047; WO9744452 |
| FcRH1 (Fc receptor-like protein 1) | GenBank accession No. NP_443170.1) WO2003077836; |
| | WO200138490; WO2003089624; EP1347046; |
| | WO2003089624 |
| IRTA2 (Immunoglobulin superfamily | GenBank accession No. Human: AF343662, AF343663, |
| receptor translocation associated 2) | AF343664, AF343665, AF369794, AF397453; |
| | WO2003024392; WO2003077836; WO200138490 |
| TENB2 (TMEFF2, tomoregulin, | GenBank accession No. AF179274; AY358907, CAF85723, |
| TPEF, HPP1) | CQ782436; WO2004074320; WO2003042661; |
| | WO2003009814; EP1295944; WO200230268; |
| | WO200190304; US2004249130; US2004022727; |
| | WO2004063355; US2004197325; US2003232350; |
| | US2004005563; US2003124579 |
| CS1 (CRACC, 19A, APEX-1, | GenBank Accession No. NM 021181; US 20100168397 |
| FOAP12) | |
| DLL4 | GenBank Accession No. NM 019074; US 20100303812 |
| Lewis Y | ADB235860; U.S. Pat. No. 7,879,983 |
| CD40 (Bp50, CDW40, MGC9013, | AL035662.65; U.S. Pat. No. 6,946,129 |
| TNFRSF5, p50) | |
| OBA1 (5T4) | GenBank Accession No. NP_001159864.1; US |
| | 20100021483 |
| p97 | Woodbury et al., 1980, Proc. Natl. Acad. Sci. USA 77: |
| | 2183-2186; Brown et al., 1981, J. Immunol. 127: 539-546 |
| carcinoembryonic antigen (CEA) | GenBank Accession No. NP_004354.2; U.S. Pat. No. 6,676,924 |
| TAG-72 | U.S. Pat. No. 7,256,004 |
| DNA | |
| Neuropilin-1 (NRP1) | GenBank Accession No. NP_001019799.1; US |
| | 20080213268 |
| A33 | GenBank Accession No. NP_005805.1; U.S. Pat. No. 7,579,187 |
| Mucin-1 (MUC1) | GenBank Accession No. NP_001018016.1; |
| | NP_001018017.1; U.S. Pat. No. 7,183,388 |
| ED-B fibronectin | U.S. Pat. No. 7,785,591 |
| Thomsen-Friedenreich antigen (TF) | U.S. Pat. No. 7,374,755; US 20100297159 |
| Bombesin receptor | U.S. Pat. No. 5,750,370 |
| CanAg | |
| Carcinoembryonic antigen (CEA) | U.S. Pat. No. 4,818,709 |
| CD13 | |
| CD138 | |
| CD30 | |
| CD33 | |
| CD38 | |
| CD40 | |
| CD47 | |
| CD56 | |
| CD70 | |
| Chondroitin sulfate proteoglygan NG2 | |
| EphA2 | |
| Folate receptor 1 | U.S. Pat. No. 5,547,668 |
| gastrin receptor | |
| GPNMB (human gylcoprotein) | |
| NMB (osteoactivin) | |
| GRP receptor subtype | |
| integrin avb3 | US20110166072 |
| LHRHR | US20110104074 |
| LRP receptor | |
| LyP-1 receptor | |
| Nectin-4 | |
| Neurotensin receptor | U.S. Pat. No. 8,058,230 |
| Nucleolin | |
| Somatostatin receptor | |
| TIM1 | |
| VPAC1 | |
| VPAC2 | |
| Alpha-MSH receptor | |
| CD25 | |
| Interleukin-1 receptor | |

TABLE 4
Target Ligands for Targeting Moieties
Cancer Target Ligand

Androgen Receptor
Alpha integrins
Alpha-V Beta 6 integrin
angiopoietin 2
B7-H3
BAFF
C242 antigen
CA-125
carbonic anhydrase 9 (CA-IX)
cardiac myosin
CCR4
CD117
CD11a
CD13
CD132
CD137
CD138
CD140
CD152
CD166
CD172A
CD19
CD2
CD20
CD22
CD221
CD23
CD25
CD28
CD3
CD30
CD33
CD37
CD38
CD40
CD40L
CD41
CD44
CD47
CD51
CD52
CD56
CD6
CD64
CD70
CD74
CD80
CD81
CD86
CD9
CD95
CEACAM5
CEACAM6
Claudin-3
Claudin-4
cMet
CSFR
CSFR-1
CTLA-4
DLL4
DPP4
EGFR
EpCAM
EphA2
FAP
FGF2
FGF4
FGF8
FGFR1
FGFR2
FGFR3
FGFR4
Folate Receptor
G-CSF
GLUT1
GLUT4
GM-CSF
GP130
GPNMB
HE4
HER2/neu, CD3
HER3
HGF
HLA-DR
human scatter factor receptor kinase
IGF-1 receptor
IGF1R
IGF-I
IgG4
IL1
IL11
IL12
IL12R
IL13
IL-13
IL13R
IL15
IL-17A
IL18
IL1R
IL2
IL21
IL23
IL23R
IL27
IL27R
IL29
IL2R
IL31
IL31R
IL4
IL4R
IL6
IL-6
IL6R
ILGF2
INSR
integrin α5β1
integrin αvβ3
Jagged Receptors and Ligands
LAG-3
Lewis-Y antigen
LIFR
LTA
MCP-1
mesothelin
MRP4
MS4A1
MUC1
mucin CanAg
NARP-1
Neutrophil Elastase
NGF
N-glycolylneuraminic acid
Nicastrin
Notch Ligands
Notch Receptors
OX40
PCSK9
PD-1
PDGF Ligands
PDGF Receptors
PDGF-R α
PD-L1
PD-L2
PSCA
PSMA
Rhesus factor
RON
SDC1
SLAMF7
sphingosine-1-phosphate
TAG-72
TEM1
tenascin C
TGF beta
TIM-3
TLR2-9
TNF alpha
TNFR
TRAIL receptors
TRAIL-R1
TRAIL-R2
tumor antigen CTAA16.88
tumor specific glycosylation of MUC1
TWEAK receptor
TYRP1(glycoprotein 75)
VAM-1
VEGF
VEGF Receptors
VEGF-A
VEGFR1
VEGFR2
vimentin

[0210] In particular embodiments, the invention provides targeted conjugate compositions comprising one, two or more targeting moieties and one, two or more types of drugs conjugated to different CCD, and one, two or more XTEN. Non-limiting embodiments of specific targeted conjugate compositions are provided in Table 5, in which the named composition has specified components of: i) targeting moiety; ii) CCD; iii) PCM sequence; iv) XTEN sequences of Table 10 and v) drug (wherein a drug molecule is linked to each cysteine of the corresponding CCD). With respect to the XTEN sequences of Table 5 in the listed conjugates, it is specifically intended that the XTEN can encompass the AE, AF and AG variations of the XTEN described in Table 10; e.g., XTEN864 includes AE864, AF864 and AG864. In one embodiment, a targeted conjugate compositiona of Table 5 is configured according to formula II, below. In another embodiment, a targeted conjugate composition of Table 5 is configured according to formula III, below. As would be appreciated by one of skill in the art, it is specifically contemplated that other combinations of the disclosed components, as well as different numbers or ratios of the respective specified components, as well as different XTEN sequences to which the payloads are conjugated, as well as different targeting moieties described herein may be substituted for those indicated in the exemplary examples in the Table. For example, the invention contemplates that the number of drug molecules attached to a given CCD can be 1, or 2, or 3, or 4, or 5, or 6, or 7, or 8, or 9 or more and that the CCD would have, the corresponding number of cysteine residues to which the drug moieties would be conjugated. Further, the invention contemplates that the number of targeting moieties attached to the subject compositions can be 1, or 2, or 3 or more, which would similarly be fused to an N-terminal amino group or conjugated to a corresponding number of cysteine or lysine residues in the composition.

TABLE 5
Exemplary targeted conjugate compositions

| | Conjugate Description* | | Conjugate Description |
|---|---|---|---|
| Conjugate | (TM¹ + CCD² + PCM³ + XTEN⁴ + Drug⁵) | Conjugate | (TM¹ + CCD² + PCM³ + XTEN⁴ + Drug⁵) |
| 1 | aHER2_scFv-CCD50-BSRS1-XTEN713- | 433 | aHER2_scFv-CCD50-BSRS1-XTEN713- |
| | DM1 | | MMAE |
| 2 | Folate-CCD50-BSRS1-XTEN713-DM1 | 434 | Folate-CCD50-BSRS1-XTEN713-MMAE |
| 3 | aCEA_scFv-CCD50-BSRS1-XTEN713- | 435 | aCEA_scFv-CCD50-BSRS1-XTEN713- |
| | DM1 | | MMAE |
| 4 | aEpCAM_scFv-CCD50-BSRS1-XTEN713- | 436 | aEpCAM_scFv-CCD50-BSRS1-XTEN713- |
| | DM1 | | MMAE |
| 5 | aHER2_scFv-CCD51-BSRS1-XTEN713- | 437 | aHER2_scFv-CCD51-BSRS1-XTEN713- |
| | DM1 | | MMAE |
| 6 | Folate-CCD51-BSRS1-XTEN713-DM1 | 438 | Folate-CCD51-BSRS1-XTEN713-MMAE |
| 7 | aCEA_scFv-CCD51-BSRS1-XTEN713- | 439 | aCEA_scFv-CCD51-BSRS1-XTEN713- |
| | DM1 | | MMAE |
| 8 | aEpCAM_scFv-CCD51-BSRS1-XTEN713- | 440 | aEpCAM_scFv-CCD51-BSRS1-XTEN713- |
| | DM1 | | MMAE |
| 9 | aHER2_scFv-CCD1-BSRS1-XTEN713- | 441 | aHER2_scFv-CCD1-BSRS1-XTEN713- |
| | DM1 | | MMAE |
| 10 | Folate-CCD1-BSRS1-XTEN713-DM1 | 442 | Folate-CCD1-BSRS1-XTEN713-MMAE |
| 11 | aCEA_scFv-CCD1-BSRS1-XTEN713- | 443 | aCEA_scFv-CCD1-BSRS1-XTEN713-MMAE |
| | DM1 | | |
| 12 | aEpCAM_scFv-CCD1-BSRS1-XTEN713- | 444 | aEpCAM_scFv-CCD1-BSRS1-XTEN713- |
| | DM1 | | MMAE |
| 13 | aHER2_scFv-CCD7-BSRS1-XTEN713- | 445 | aHER2_scFv-CCD7-BSRS1-XTEN713- |
| | DM1 | | MMAE |
| 14 | Folate-CCD7-BSRS1-XTEN713-DM1 | 446 | Folate-CCD7-BSRS1-XTEN713-MMAE |
| 15 | aCEA_scFv-CCD7-BSRS1-XTEN713- | 447 | aCEA_scFv-CCD7-BSRS1-XTEN713-MMAE |
| | DM1 | | |
| 16 | aEpCAM_scFv-CCD7-BSRS1-XTEN713- | 448 | aEpCAM_scFv-CCD7-BSRS1-XTEN713- |
| | DM1 | | MMAE |
| 17 | aHER2_scFv-CCD12-BSRS1-XTEN713- | 449 | aHER2_scFv-CCD12-BSRS1-XTEN713- |
| | DM1 | | MMAE |
| 18 | Folate-CCD12-BSRS1-XTEN713-DM1 | 450 | Folate-CCD12-BSRS1-XTEN713-MMAE |
| 19 | aCEA_scFv-CCD12-BSRS1-XTEN713- | 451 | aCEA_scFv-CCD12-BSRS1-XTEN713- |
| | DM1 | | MMAE |
| 20 | aEpCAM_scFv-CCD12-BSRS1-XTEN713- | 452 | aEpCAM_scFv-CCD12-BSRS1-XTEN713- |
| | DM1 | | MMAE |
| 21 | aHER2_scFv-CCD16-BSRS1-XTEN713- | 453 | aHER2_scFv-CCD16-BSRS1-XTEN713- |
| | DM1 | | MMAE |
| 22 | Folate-CCD16-BSRS1-XTEN713-DM1 | 454 | Folate-CCD16-BSRS1-XTEN713-MMAE |
| 23 | aCEA_scFv-CCD16-BSRS1-XTEN713- | 455 | aCEA_scFv-CCD16-BSRS1-XTEN713- |
| | DM1 | | MMAE |
| 24 | aEpCAM_scFv-CCD16-BSRS1-XTEN713- | 456 | aEpCAM_scFv-CCD16-BSRS1-XTEN713- |
| | DM1 | | MMAE |
| 25 | aHER2_scFv-CCD50-BSRS2-XTEN713- | 457 | aHER2_scFv-CCD50-BSRS2-XTEN713- |
| | DM1 | | MMAE |
| 26 | Folate-CCD50-BSRS2-XTEN713-DM1 | 458 | Folate-CCD50-BSRS2-XTEN713-MMAE |
| 27 | aCEA_scFv-CCD50-BSRS2-XTEN713- | 459 | aCEA_scFv-CCD50-BSRS2-XTEN713- |
| | DM1 | | MMAE |
| 28 | aEpCAM_scFv-CCD50-BSRS2-XTEN713- | 460 | aEpCAM_scFv-CCD50-BSRS2-XTEN713- |
| | DM1 | | MMAE |
| 29 | aHER2_scFv-CCD51-BSRS2-XTEN713- | 461 | aHER2_scFv-CCD51-BSRS2-XTEN713- |
| | DM1 | | MMAE |
| 30 | Folate-CCD51-BSRS2-XTEN713-DM1 | 462 | Folate-CCD51-BSRS2-XTEN713-MMAE |
| 31 | aCEA_scFv-CCD51-BSRS2-XTEN713- | 463 | aCEA_scFv-CCD51-BSRS2-XTEN713- |
| | DM1 | | MMAE |
| 32 | aEpCAM_scFv-CCD51-BSRS2-XTEN713- | 464 | aEpCAM_scFv-CCD51-BSRS2-XTEN713- |
| | DM1 | | MMAE |
| 33 | aHER2_scFv-CCD1-BSRS2-XTEN713- | 465 | aHER2_scFv-CCD1-BSRS2-XTEN713- |
| | DM1 | | MMAE |
| 34 | Folate-CCD1-BSRS2-XTEN713-DM1 | 466 | Folate-CCD1-BSRS2-XTEN713-MMAE |
| 35 | aCEA_scFv-CCD1-BSRS2-XTEN713- | 467 | aCEA_scFv-CCD1-BSRS2-XTEN713-MMAE |
| | DM1 | | |
| 36 | aEpCAM_scFv-CCD1-BSRS2-XTEN713- | 468 | aEpCAM_scFv-CCD1-BSRS2-XTEN713- |
| | DM1 | | MMAE |
| 37 | aHER2_scFv-CCD7-BSRS2-XTEN713- | 469 | aHER2_scFv-CCD7-BSRS2-XTEN713- |
| | DM1 | | MMAE |
| 38 | Folate-CCD7-BSRS2-XTEN713-DM1 | 470 | Folate-CCD7-BSRS2-XTEN713-MMAE |
| 39 | aCEA_scFv-CCD7-BSRS2-XTEN713- | 471 | aCEA_scFv-CCD7-BSRS2-XTEN713-MMAE |
| | DM1 | | |
| 40 | aEpCAM_scFv-CCD7-BSRS2-XTEN713- | 472 | aEpCAM_scFv-CCD7-BSRS2-XTEN713- |
| | DM1 | | MMAE |
| 41 | aHER2_scFv-CCD12-BSRS2-XTEN713- | 473 | aHER2_scFv-CCD12-BSRS2-XTEN713- |
| | DM1 | | MMAE |
| 42 | Folate-CCD12-BSRS2-XTEN713-DM1 | 474 | Folate-CCD12-BSRS2-XTEN713-MMAE |
| 43 | aCEA_scFv-CCD12-BSRS2-XTEN713- | 475 | aCEA_scFv-CCD12-BSRS2-XTEN713- |
| | DM1 | | MMAE |
| 44 | aEpCAM_scFv-CCD12-BSRS2-XTEN713- | 476 | aEpCAM_scFv-CCD12-BSRS2-XTEN713- |
| | DM1 | | MMAE |
| 45 | aHER2_scFv-CCD16-BSRS2-XTEN713- | 477 | aHER2_scFv-CCD16-BSRS2-XTEN713- |
| | DM1 | | MMAE |
| 46 | Folate-CCD16-BSRS2-XTEN713-DM1 | 478 | Folate-CCD16-BSRS2-XTEN713-MMAE |
| 47 | aCEA_scFv-CCD16-BSRS2-XTEN713- | 479 | aCEA_scFv-CCD16-BSRS2-XTEN713- |
| | DM1 | | MMAE |
| 48 | aEpCAM_scFv-CCD16-BSRS2-XTEN713- | 480 | aEpCAM_scFv-CCD16-BSRS2-XTEN713- |
| | DM1 | | MMAE |
| 49 | aHER2_scFv-CCD50-BSRS3-XTEN713- | 481 | aHER2_scFv-CCD50-BSRS3-XTEN713- |
| | DM1 | | MMAE |
| 50 | Folate-CCD50-BSRS3-XTEN713-DM1 | 482 | Folate-CCD50-BSRS3-XTEN713-MMAE |
| 51 | aCEA_scFv-CCD50-BSRS3-XTEN713- | 483 | aCEA_scFv-CCD50-BSRS3-XTEN713- |
| | DM1 | | MMAE |
| 52 | aEpCAM_scFv-CCD50-BSRS3-XTEN713- | 484 | aEpCAM_scFv-CCD50-BSRS3-XTEN713- |
| | DM1 | | MMAE |
| 53 | aHER2_scFv-CCD51-BSRS3-XTEN713- | 485 | aHER2_scFv-CCD51-BSRS3-XTEN713- |
| | DM1 | | MMAE |
| 54 | Folate-CCD51-BSRS3-XTEN713-DM1 | 486 | Folate-CCD51-BSRS3-XTEN713-MMAE |
| 55 | aCEA_scFv-CCD51-BSRS3-XTEN713- | 487 | aCEA_scFv-CCD51-BSRS3-XTEN713- |
| | DM1 | | MMAE |
| 56 | aEpCAM_scFv-CCD51-BSRS3-XTEN713- | 488 | aEpCAM_scFv-CCD51-BSRS3-XTEN713- |
| | DM1 | | MMAE |
| 57 | aHER2_scFv-CCD1-BSRS3-XTEN713- | 489 | aHER2_scFv-CCD1-BSRS3-XTEN713- |
| | DM1 | | MMAE |
| 58 | Folate-CCD1-BSRS3-XTEN713-DM1 | 490 | Folate-CCD1-BSRS3-XTEN713-MMAE |
| 59 | aCEA_scFv-CCD1-BSRS3-XTEN713- | 491 | aCEA_scFv-CCD1-BSRS3-XTEN713-MMAE |
| | DM1 | | |
| 60 | aEpCAM_scFv-CCD1-BSRS3-XTEN713- | 492 | aEpCAM_scFv-CCD1-BSRS3-XTEN713- |
| | DM1 | | MMAE |
| 61 | aHER2_scFv-CCD7-BSRS3-XTEN713- | 493 | aHER2_scFv-CCD7-BSRS3-XTEN713- |
| | DM1 | | MMAE |
| 62 | Folate-CCD7-BSRS3-XTEN713-DM1 | 494 | Folate-CCD7-BSRS3-XTEN713-MMAE |
| 63 | aCEA_scFv-CCD7-BSRS3-XTEN713- | 495 | aCEA_scFv-CCD7-BSRS3-XTEN713-MMAE |
| | DM1 | | |
| 64 | aEpCAM_scFv-CCD7-BSRS3-XTEN713- | 496 | aEpCAM_scFv-CCD7-BSRS3-XTEN713- |
| | DM1 | | MMAE |
| 65 | aHER2_scFv-CCD12-BSRS3-XTEN713- | 497 | aHER2_scFv-CCD12-BSRS3-XTEN713- |
| | DM1 | | MMAE |
| 66 | Folate-CCD12-BSRS3-XTEN713-DM1 | 498 | Folate-CCD12-BSRS3-XTEN713-MMAE |
| 67 | aCEA_scFv-CCD12-BSRS3-XTEN713- | 499 | aCEA_scFv-CCD12-BSRS3-XTEN713- |
| | DM1 | | MMAE |
| 68 | aEpCAM_scFv-CCD12-BSRS3-XTEN713- | 500 | aEpCAM_scFv-CCD12-BSRS3-XTEN713- |
| | DM1 | | MMAE |
| 69 | aHER2_scFv-CCD16-BSRS3-XTEN713- | 501 | aHER2_scFv-CCD16-BSRS3-XTEN713- |
| | DM1 | | MMAE |
| 70 | Folate-CCD16-BSRS3-XTEN713-DM1 | 502 | Folate-CCD16-BSRS3-XTEN713-MMAE |
| 71 | aCEA_scFv-CCD16-BSRS3-XTEN713- | 503 | aCEA_scFv-CCD16-BSRS3-XTEN713- |
| | DM1 | | MMAE |
| 72 | aEpCAM_scFv-CCD16-BSRS3-XTEN713- | 504 | aEpCAM_scFv-CCD16-BSRS3-XTEN713- |
| | DM1 | | MMAE |
| 73 | aHER2_scFv-CCD50-BSRS4-XTEN713- | 505 | aHER2_scFv-CCD50-BSRS4-XTEN713- |
| | DM1 | | MMAE |
| 74 | Folate-CCD50-BSRS4-XTEN713-DM1 | 506 | Folate-CCD50-BSRS4-XTEN713-MMAE |
| 75 | aCEA_scFv-CCD50-BSRS4-XTEN713- | 507 | aCEA_scFv-CCD50-BSRS4-XTEN713- |
| | DM1 | | MMAE |
| 76 | aEpCAM_scFv-CCD50-BSRS4-XTEN713- | 508 | aEpCAM_scFv-CCD50-BSRS4-XTEN713- |
| | DM1 | | MMAE |
| 77 | aHER2_scFv-CCD51-BSRS4-XTEN713- | 509 | aHER2_scFv-CCD51-BSRS4-XTEN713- |
| | DM1 | | MMAE |
| 78 | Folate-CCD51-BSRS4-XTEN713-DM1 | 510 | Folate-CCD51-BSRS4-XTEN713-MMAE |
| 79 | aCEA_scFv-CCD51-BSRS4-XTEN713- | 511 | aCEA_scFv-CCD51-BSRS4-XTEN713- |
| | DM1 | | MMAE |
| 80 | aEpCAM_scFv-CCD51-BSRS4-XTEN713- | 512 | aEpCAM_scFv-CCD51-BSRS4-XTEN713- |
| | DM1 | | MMAE |
| 81 | aHER2_scFv-CCD1-BSRS4-XTEN713- | 513 | aHER2_scFv-CCD1-BSRS4-XTEN713- |
| | DM1 | | MMAE |
| 82 | Folate-CCD1-BSRS4-XTEN713-DM1 | 514 | Folate-CCD1-BSRS4-XTEN713-MMAE |
| 83 | aCEA_scFv-CCD1-BSRS4-XTEN713- | 515 | aCEA_scFv-CCD1-BSRS4-XTEN713-MMAE |
| | DM1 | | |
| 84 | aEpCAM_scFv-CCD1-BSRS4-XTEN713- | 516 | aEpCAM_scFv-CCD1-BSRS4-XTEN713- |
| | DM1 | | MMAE |
| 85 | aHER2_scFv-CCD7-BSRS4-XTEN713- | 517 | aHER2_scFv-CCD7-BSRS4-XTEN713- |
| | DM1 | | MMAE |
| 86 | Folate-CCD7-BSRS4-XTEN713-DM1 | 518 | Folate-CCD7-BSRS4-XTEN713-MMAE |
| 87 | aCEA_scFv-CCD7-BSRS4-XTEN713- | 519 | aCEA_scFv-CCD7-BSRS4-XTEN713-MMAE |
| | DM1 | | |
| 88 | aEpCAM_scFv-CCD7-BSRS4-XTEN713- | 520 | aEpCAM_scFv-CCD7-BSRS4-XTEN713- |
| | DM1 | | MMAE |
| 89 | aHER2_scFv-CCD12-BSRS4-XTEN713- | 521 | aHER2_scFv-CCD12-BSRS4-XTEN713- |
| | DM1 | | MMAE |
| 90 | Folate-CCD12-BSRS4-XTEN713-DM1 | 522 | Folate-CCD12-BSRS4-XTEN713-MMAE |
| 91 | aCEA_scFv-CCD12-BSRS4-XTEN713- | 523 | aCEA_scFv-CCD12-BSRS4-XTEN713- |
| | DM1 | | MMAE |
| 92 | aEpCAM_scFv-CCD12-BSRS4-XTEN713- | 524 | aEpCAM_scFv-CCD12-BSRS4-XTEN713- |
| | DM1 | | MMAE |
| 93 | aHER2_scFv-CCD16-BSRS4-XTEN713- | 525 | aHER2_scFv-CCD16-BSRS4-XTEN713- |
| | DM1 | | MMAE |
| 94 | Folate-CCD16-BSRS4-XTEN713-DM1 | 526 | Folate-CCD16-BSRS4-XTEN713-MMAE |
| 95 | aCEA_scFv-CCD16-BSRS4-XTEN713- | 527 | aCEA_scFv-CCD16-BSRS4-XTEN713- |
| | DM1 | | MMAE |
| 96 | aEpCAM_scFv-CCD16-BSRS4-XTEN713- | 528 | aEpCAM_scFv-CCD16-BSRS4-XTEN713- |
| | DM1 | | MMAE |
| 97 | aHER2_scFv-CCD50-BSRS5-XTEN713- | 529 | aHER2_scFv-CCD50-BSRS5-XTEN713- |
| | DM1 | | MMAE |
| 98 | Folate-CCD50-BSRS5-XTEN713-DM1 | 530 | Folate-CCD50-BSRS5-XTEN713-MMAE |
| 99 | aCEA_scFv-CCD50-BSRS5-XTEN713- | 531 | aCEA_scFv-CCD50-BSRS5-XTEN713- |
| | DM1 | | MMAE |
| 100 | aEpCAM_scFv-CCD50-BSRS5-XTEN713- | 532 | aEpCAM_scFv-CCD50-BSRS5-XTEN713- |
| | DM1 | | MMAE |
| 101 | aHER2_scFv-CCD51-BSRS5-XTEN713- | 533 | aHER2_scFv-CCD51-BSRS5-XTEN713- |
| | DM1 | | MMAE |
| 102 | Folate-CCD51-BSRS5-XTEN713-DM1 | 534 | Folate-CCD51-BSRS5-XTEN713-MMAE |
| 103 | aCEA_scFv-CCD51-BSRS5-XTEN713- | 535 | aCEA_scFv-CCD51-BSRS5-XTEN713- |
| | DM1 | | MMAE |
| 104 | aEpCAM_scFv-CCD51-BSRS5-XTEN713- | 536 | aEpCAM_scFv-CCD51-BSRS5-XTEN713- |
| | DM1 | | MMAE |
| 105 | aHER2_scFv-CCD1-BSRS5-XTEN713- | 537 | aHER2_scFv-CCD1-BSRS5-XTEN713- |
| | DM1 | | MMAE |
| 106 | Folate-CCD1-BSRS5-XTEN713-DM1 | 538 | Folate-CCD1-BSRS5-XTEN713-MMAE |
| 107 | aCEA_scFv-CCD1-BSRS5-XTEN713- | 539 | aCEA_scFv-CCD1-BSRS5-XTEN713-MMAE |
| | DM1 | | |
| 108 | aEpCAM_scFv-CCD1-BSRS5-XTEN713- | 540 | aEpCAM_scFv-CCD1-BSRS5-XTEN713- |
| | DM1 | | MMAE |
| 109 | aHER2_scFv-CCD7-BSRS5-XTEN713- | 541 | aHER2_scFv-CCD7-BSRS5-XTEN713- |
| | DM1 | | MMAE |
| 110 | Folate-CCD7-BSRS5-XTEN713-DM1 | 542 | Folate-CCD7-BSRS5-XTEN713-MMAE |
| 111 | aCEA_scFv-CCD7-BSRS5-XTEN713- | 543 | aCEA_scFv-CCD7-BSRS5-XTEN713-MMAE |
| | DM1 | | |
| 112 | aEpCAM_scFv-CCD7-BSRS5-XTEN713- | 544 | aEpCAM_scFv-CCD7-BSRS5-XTEN713- |
| | DM1 | | MMAE |
| 113 | aHER2_scFv-CCD12-BSRS5-XTEN713- | 545 | aHER2_scFv-CCD12-BSRS5-XTEN713- |
| | DM1 | | MMAE |
| 114 | Folate-CCD12-BSRS5-XTEN713-DM1 | 546 | Folate-CCD12-BSRS5-XTEN713-MMAE |
| 115 | aCEA_scFv-CCD12-BSRS5-XTEN713- | 547 | aCEA_scFv-CCD12-BSRS5-XTEN713- |
| | DM1 | | MMAE |
| 116 | aEpCAM_scFv-CCD12-BSRS5-XTEN713- | 548 | aEpCAM_scFv-CCD12-BSRS5-XTEN713- |
| | DM1 | | MMAE |
| 117 | aHER2_scFv-CCD16-BSRS5-XTEN713- | 549 | aHER2_scFv-CCD16-BSRS5-XTEN713- |
| | DM1 | | MMAE |
| 118 | Folate-CCD16-BSRS5-XTEN713-DM1 | 550 | Folate-CCD16-BSRS5-XTEN713-MMAE |
| 119 | aCEA_scFv-CCD16-BSRS5-XTEN713- | 551 | aCEA_scFv-CCD16-BSRS5-XTEN713- |
| | DM1 | | MMAE |
| 120 | aEpCAM_scFv-CCD16-BSRS5-XTEN713- | 552 | aEpCAM_scFv-CCD16-BSRS5-XTEN713- |
| | DM1 | | MMAE |
| 121 | aHER2_scFv-CCD50-BSRS6-XTEN713- | 553 | aHER2_scFv-CCD50-BSRS6-XTEN713- |
| | DM1 | | MMAE |
| 122 | Folate-CCD50-BSRS6-XTEN713-DM1 | 554 | Folate-CCD50-BSRS6-XTEN713-MMAE |
| 123 | aCEA_scFv-CCD50-BSRS6-XTEN713- | 555 | aCEA_scFv-CCD50-BSRS6-XTEN713- |
| | DM1 | | MMAE |
| 124 | aEpCAM_scFv-CCD50-BSRS6-XTEN713- | 556 | aEpCAM_scFv-CCD50-BSRS6-XTEN713- |
| | DM1 | | MMAE |
| 125 | aHER2_scFv-CCD51-BSRS6-XTEN713- | 557 | aHER2_scFv-CCD51-BSRS6-XTEN713- |
| | DM1 | | MMAE |
| 126 | Folate-CCD51-BSRS6-XTEN713-DM1 | 558 | Folate-CCD51-BSRS6-XTEN713-MMAE |
| 127 | aCEA_scFv-CCD51-BSRS6-XTEN713- | 559 | aCEA_scFv-CCD51-BSRS6-XTEN713- |
| | DM1 | | MMAE |
| 128 | aEpCAM_scFv-CCD51-BSRS6-XTEN713- | 560 | aEpCAM_scFv-CCD51-BSRS6-XTEN713- |
| | DM1 | | MMAE |
| 129 | aHER2_scFv-CCD1-BSRS6-XTEN713- | 561 | aHER2_scFv-CCD1-BSRS6-XTEN713- |
| | DM1 | | MMAE |
| 130 | Folate-CCD1-BSRS6-XTEN713-DM1 | 562 | Folate-CCD1-BSRS6-XTEN713-MMAE |
| 131 | aCEA_scFv-CCD1-BSRS6-XTEN713- | 563 | aCEA_scFv-CCD1-BSRS6-XTEN713-MMAE |
| | DM1 | | |
| 132 | aEpCAM_scFv-CCD1-BSRS6-XTEN713- | 564 | aEpCAM_scFv-CCD1-BSRS6-XTEN713- |
| | DM1 | | MMAE |
| 133 | aHER2_scFv-CCD7-BSRS6-XTEN713- | 565 | aHER2_scFv-CCD7-BSRS6-XTEN713- |
| | DM1 | | MMAE |
| 134 | Folate-CCD7-BSRS6-XTEN713-DM1 | 566 | Folate-CCD7-BSRS6-XTEN713-MMAE |
| 135 | aCEA_scFv-CCD7-BSRS6-XTEN713- | 567 | aCEA_scFv-CCD7-BSRS6-XTEN713-MMAE |
| | DM1 | | |
| 136 | aEpCAM_scFv-CCD7-BSRS6-XTEN713- | 568 | aEpCAM_scFv-CCD7-BSRS6-XTEN713- |
| | DM1 | | MMAE |
| 137 | aHER2_scFv-CCD12-BSRS6-XTEN713- | 569 | aHER2_scFv-CCD12-BSRS6-XTEN713- |
| | DM1 | | MMAE |
| 138 | Folate-CCD12-BSRS6-XTEN713-DM1 | 570 | Folate-CCD12-BSRS6-XTEN713-MMAE |
| 139 | aCEA_scFv-CCD12-BSRS6-XTEN713- | 571 | aCEA_scFv-CCD12-BSRS6-XTEN713- |
| | DM1 | | MMAE |
| 140 | aEpCAM_scFv-CCD12-BSRS6-XTEN713- | 572 | aEpCAM_scFv-CCD12-BSRS6-XTEN713- |
| | DM1 | | MMAE |
| 141 | aHER2_scFv-CCD16-BSRS6-XTEN713- | 573 | aHER2_scFv-CCD16-BSRS6-XTEN713- |
| | DM1 | | MMAE |
| 142 | Folate-CCD16-BSRS6-XTEN713-DM1 | 574 | Folate-CCD16-BSRS6-XTEN713-MMAE |
| 143 | aCEA_scFv-CCD16-BSRS6-XTEN713- | 575 | aCEA_scFv-CCD16-BSRS6-XTEN713- |
| | DM1 | | MMAE |
| 144 | aEpCAM_scFv-CCD16-BSRS6-XTEN713- | 576 | aEpCAM_scFv-CCD16-BSRS6-XTEN713- |
| | DM1 | | MMAE |
| 145 | aHER2_scFv-CCD50-BSRS1-XTEN864- | 577 | aHER2_scFv-CCD50-BSRS1-XTEN864- |
| | DM1 | | MMAE |
| 146 | Folate-CCD50-BSRS1-XTEN864-DM1 | 578 | Folate-CCD50-BSRS1-XTEN864-MMAE |
| 147 | aCEA_scFv-CCD50-BSRS1-XTEN864- | 579 | aCEA_scFv-CCD50-BSRS1-XTEN864- |
| | DM1 | | MMAE |
| 148 | aEpCAM_scFv-CCD50-BSRS1-XTEN864- | 580 | aEpCAM_scFv-CCD50-BSRS1-XTEN864- |
| | DM1 | | MMAE |
| 149 | aHER2_scFv-CCD51-BSRS1-XTEN864- | 581 | aHER2_scFv-CCD51-BSRS1-XTEN864- |
| | DM1 | | MMAE |
| 150 | Folate-CCD51-BSRS1-XTEN864-DM1 | 582 | Folate-CCD51-BSRS1-XTEN864-MMAE |
| 151 | aCEA_scFv-CCD51-BSRS1-XTEN864- | 583 | aCEA_scFv-CCD51-BSRS1-XTEN864- |
| | DM1 | | MMAE |
| 152 | aEpCAM_scFv-CCD51-BSRS1-XTEN864- | 584 | aEpCAM_scFv-CCD51-BSRS1-XTEN864- |
| | DM1 | | MMAE |
| 153 | aHER2_scFv-CCD1-BSRS1-XTEN864- | 585 | aHER2_scFv-CCD1-BSRS1-XTEN864- |
| | DM1 | | MMAE |
| 154 | Folate-CCD1-BSRS1-XTEN864-DM1 | 586 | Folate-CCD1-BSRS1-XTEN864-MMAE |
| 155 | aCEA_scFv-CCD1-BSRS1-XTEN864- | 587 | aCEA_scFv-CCD1-BSRS1-XTEN864-MMAE |
| | DM1 | | |
| 156 | aEpCAM_scFv-CCD1-BSRS1-XTEN864- | 588 | aEpCAM_scFv-CCD1-BSRS1-XTEN864- |
| | DM1 | | MMAE |
| 157 | aHER2_scFv-CCD7-BSRS1-XTEN864- | 589 | aHER2_scFv-CCD7-BSRS1-XTEN864- |
| | DM1 | | MMAE |
| 158 | Folate-CCD7-BSRS1-XTEN864-DM1 | 590 | Folate-CCD7-BSRS1-XTEN864-MMAE |
| 159 | aCEA_scFv-CCD7-BSRS1-XTEN864- | 591 | aCEA_scFv-CCD7-BSRS1-XTEN864-MMAE |
| | DM1 | | |
| 160 | aEpCAM_scFv-CCD7-BSRS1-XTEN864- | 592 | aEpCAM_scFv-CCD7-BSRS1-XTEN864- |
| | DM1 | | MMAE |
| 161 | aHER2_scFv-CCD12-BSRS1-XTEN864- | 593 | aHER2_scFv-CCD12-BSRS1-XTEN864- |
| | DM1 | | MMAE |
| 162 | Folate-CCD12-BSRS1-XTEN864-DM1 | 594 | Folate-CCD12-BSRS1-XTEN864-MMAE |
| 163 | aCEA_scFv-CCD12-BSRS1-XTEN864- | 595 | aCEA_scFv-CCD12-BSRS1-XTEN864- |
| | DM1 | | MMAE |
| 164 | aEpCAM_scFv-CCD12-BSRS1-XTEN864- | 596 | aEpCAM_scFv-CCD12-BSRS1-XTEN864- |
| | DM1 | | MMAE |
| 165 | aHER2_scFv-CCD16-BSRS1-XTEN864- | 597 | aHER2_scFv-CCD16-BSRS1-XTEN864- |
| | DM1 | | MMAE |
| 166 | Folate-CCD16-BSRS1-XTEN864-DM1 | 598 | Folate-CCD16-BSRS1-XTEN864-MMAE |
| 167 | aCEA_scFv-CCD16-BSRS1-XTEN864- | 599 | aCEA_scFv-CCD16-BSRS1-XTEN864- |
| | DM1 | | MMAE |
| 168 | aEpCAM_scFv-CCD16-BSRS1-XTEN864- | 600 | aEpCAM_scFv-CCD16-BSRS1-XTEN864- |
| | DM1 | | MMAE |
| 169 | aHER2_scFv-CCD50-BSRS2-XTEN864- | 601 | aHER2_scFv-CCD50-BSRS2-XTEN864- |
| | DM1 | | MMAE |
| 170 | Folate-CCD50-BSRS2-XTEN864-DM1 | 602 | Folate-CCD50-BSRS2-XTEN864-MMAE |
| 171 | aCEA_scFv-CCD50-BSRS2-XTEN864- | 603 | aCEA_scFv-CCD50-BSRS2-XTEN864- |
| | DM1 | | MMAE |
| 172 | aEpCAM_scFv-CCD50-BSRS2-XTEN864- | 604 | aEpCAM_scFv-CCD50-BSRS2-XTEN864- |
| | DM1 | | MMAE |
| 173 | aHER2_scFv-CCD51-BSRS2-XTEN864- | 605 | aHER2_scFv-CCD51-BSRS2-XTEN864- |
| | DM1 | | MMAE |
| 174 | Folate-CCD51-BSRS2-XTEN864-DM1 | 606 | Folate-CCD51-BSRS2-XTEN864-MMAE |
| 175 | aCEA_scFv-CCD51-BSRS2-XTEN864- | 607 | aCEA_scFv-CCD51-BSRS2-XTEN864- |
| | DM1 | | MMAE |
| 176 | aEpCAM_scFv-CCD51-BSRS2-XTEN864- | 608 | aEpCAM_scFv-CCD51-BSRS2-XTEN864- |
| | DM1 | | MMAE |
| 177 | aHER2_scFv-CCD1-BSRS2-XTEN864- | 609 | aHER2_scFv-CCD1-BSRS2-XTEN864- |
| | DM1 | | MMAE |
| 178 | Folate-CCD1-BSRS2-XTEN864-DM1 | 610 | Folate-CCD1-BSRS2-XTEN864-MMAE |
| 179 | aCEA_scFv-CCD1-BSRS2-XTEN864- | 611 | aCEA_scFv-CCD1-BSRS2-XTEN864-MMAE |
| | DM1 | | |
| 180 | aEpCAM_scFv-CCD1-BSRS2-XTEN864- | 612 | aEpCAM_scFv-CCD1-BSRS2-XTEN864- |
| | DM1 | | MMAE |
| 181 | aHER2_scFv-CCD7-BSRS2-XTEN864- | 613 | aHER2_scFv-CCD7-BSRS2-XTEN864- |
| | DM1 | | MMAE |
| 182 | Folate-CCD7-BSRS2-XTEN864-DM1 | 614 | Folate-CCD7-BSRS2-XTEN864-MMAE |
| 183 | aCEA_scFv-CCD7-BSRS2-XTEN864- | 615 | aCEA_scFv-CCD7-BSRS2-XTEN864-MMAE |
| | DM1 | | |
| 184 | aEpCAM_scFv-CCD7-BSRS2-XTEN864- | 616 | aEpCAM_scFv-CCD7-BSRS2-XTEN864- |
| | DM1 | | MMAE |
| 185 | aHER2_scFv-CCD12-BSRS2-XTEN864- | 617 | aHER2_scFv-CCD12-BSRS2-XTEN864- |
| | DM1 | | MMAE |
| 186 | Folate-CCD12-BSRS2-XTEN864-DM1 | 618 | Folate-CCD12-BSRS2-XTEN864-MMAE |
| 187 | aCEA_scFv-CCD12-BSRS2-XTEN864- | 619 | aCEA_scFv-CCD12-BSRS2-XTEN864- |
| | DM1 | | MMAE |
| 188 | aEpCAM_scFv-CCD12-BSRS2-XTEN864- | 620 | aEpCAM_scFv-CCD12-BSRS2-XTEN864- |
| | DM1 | | MMAE |
| 189 | aHER2_scFv-CCD16-BSRS2-XTEN864- | 621 | aHER2_scFv-CCD16-BSRS2-XTEN864- |
| | DM1 | | MMAE |
| 190 | Folate-CCD16-BSRS2-XTEN864-DM1 | 622 | Folate-CCD16-BSRS2-XTEN864-MMAE |
| 191 | aCEA_scFv-CCD16-BSRS2-XTEN864- | 623 | aCEA_scFv-CCD16-BSRS2-XTEN864- |
| | DM1 | | MMAE |
| 192 | aEpCAM_scFv-CCD16-BSRS2-XTEN864- | 624 | aEpCAM_scFv-CCD16-BSRS2-XTEN864- |
| | DM1 | | MMAE |
| 193 | aHER2_scFv-CCD50-BSRS3-XTEN864- | 625 | aHER2_scFv-CCD50-BSRS3-XTEN864- |
| | DM1 | | MMAE |
| 194 | Folate-CCD50-BSRS3-XTEN864-DM1 | 626 | Folate-CCD50-BSRS3-XTEN864-MMAE |
| 195 | aCEA_scFv-CCD50-BSRS3-XTEN864- | 627 | aCEA_scFv-CCD50-BSRS3-XTEN864- |
| | DM1 | | MMAE |
| 196 | aEpCAM_scFv-CCD50-BSRS3-XTEN864- | 628 | aEpCAM_scFv-CCD50-BSRS3-XTEN864- |
| | DM1 | | MMAE |
| 197 | aHER2_scFv-CCD51-BSRS3-XTEN864- | 629 | aHER2_scFv-CCD51-BSRS3-XTEN864- |
| | DM1 | | MMAE |
| 198 | Folate-CCD51-BSRS3-XTEN864-DM1 | 630 | Folate-CCD51-BSRS3-XTEN864-MMAE |
| 199 | aCEA_scFv-CCD51-BSRS3-XTEN864- | 631 | aCEA_scFv-CCD51-BSRS3-XTEN864- |
| | DM1 | | MMAE |
| 200 | aEpCAM_scFv-CCD51-BSRS3-XTEN864- | 632 | aEpCAM_scFv-CCD51-BSRS3-XTEN864- |
| | DM1 | | MMAE |
| 201 | aHER2_scFv-CCD1-BSRS3-XTEN864- | 633 | aHER2_scFv-CCD1-BSRS3-XTEN864- |
| | DM1 | | MMAE |
| 202 | Folate-CCD1-BSRS3-XTEN864-DM1 | 634 | Folate-CCD1-BSRS3-XTEN864-MMAE |
| 203 | aCEA_scFv-CCD1-BSRS3-XTEN864- | 635 | aCEA_scFv-CCD1-BSRS3-XTEN864-MMAE |
| | DM1 | | |
| 204 | aEpCAM_scFv-CCD1-BSRS3-XTEN864- | 636 | aEpCAM_scFv-CCD1-BSRS3-XTEN864- |
| | DM1 | | MMAE |
| 205 | aHER2_scFv-CCD7-BSRS3-XTEN864- | 637 | aHER2_scFv-CCD7-BSRS3-XTEN864- |
| | DM1 | | MMAE |
| 206 | Folate-CCD7-BSRS3-XTEN864-DM1 | 638 | Folate-CCD7-BSRS3-XTEN864-MMAE |
| 207 | aCEA_scFv-CCD7-BSRS3-XTEN864- | 639 | aCEA_scFv-CCD7-BSRS3-XTEN864-MMAE |
| | DM1 | | |
| 208 | aEpCAM_scFv-CCD7-BSRS3-XTEN864- | 640 | aEpCAM_scFv-CCD7-BSRS3-XTEN864- |
| | DM1 | | MMAE |
| 209 | aHER2_scFv-CCD12-BSRS3-XTEN864- | 641 | aHER2_scFv-CCD12-BSRS3-XTEN864- |
| | DM1 | | MMAE |
| 210 | Folate-CCD12-BSRS3-XTEN864-DM1 | 642 | Folate-CCD12-BSRS3-XTEN864-MMAE |
| 211 | aCEA_scFv-CCD12-BSRS3-XTEN864- | 643 | aCEA_scFv-CCD12-BSRS3-XTEN864- |
| | DM1 | | MMAE |
| 212 | aEpCAM_scFv-CCD12-BSRS3-XTEN864- | 644 | aEpCAM_scFv-CCD12-BSRS3-XTEN864- |
| | DM1 | | MMAE |
| 213 | aHER2_scFv-CCD16-BSRS3-XTEN864- | 645 | aHER2_scFv-CCD16-BSRS3-XTEN864- |
| | DM1 | | MMAE |
| 214 | Folate-CCD16-BSRS3-XTEN864-DM1 | 646 | Folate-CCD16-BSRS3-XTEN864-MMAE |
| 215 | aCEA_scFv-CCD16-BSRS3-XTEN864- | 647 | aCEA_scFv-CCD16-BSRS3-XTEN864- |
| | DM1 | | MMAE |
| 216 | aEpCAM_scFv-CCD16-BSRS3-XTEN864- | 648 | aEpCAM_scFv-CCD16-BSRS3-XTEN864- |
| | DM1 | | MMAE |
| 217 | aHER2_scFv-CCD50-BSRS4-XTEN864- | 649 | aHER2_scFv-CCD50-BSRS4-XTEN864- |
| | DM1 | | MMAE |
| 218 | Folate-CCD50-BSRS4-XTEN864-DM1 | 650 | Folate-CCD50-BSRS4-XTEN864-MMAE |
| 219 | aCEA_scFv-CCD50-BSRS4-XTEN864- | 651 | aCEA_scFv-CCD50-BSRS4-XTEN864- |
| | DM1 | | MMAE |
| 220 | aEpCAM_scFv-CCD50-BSRS4-XTEN864- | 652 | aEpCAM_scFv-CCD50-BSRS4-XTEN864- |
| | DM1 | | MMAE |
| 221 | aHER2_scFv-CCD51-BSRS4-XTEN864- | 653 | aHER2_scFv-CCD51-BSRS4-XTEN864- |
| | DM1 | | MMAE |
| 222 | Folate-CCD51-BSRS4-XTEN864-DM1 | 654 | Folate-CCD51-BSRS4-XTEN864-MMAE |
| 223 | aCEA_scFv-CCD51-BSRS4-XTEN864- | 655 | aCEA_scFv-CCD51-BSRS4-XTEN864- |
| | DM1 | | MMAE |
| 224 | aEpCAM_scFv-CCD51-BSRS4-XTEN864- | 656 | aEpCAM_scFv-CCD51-BSRS4-XTEN864- |
| | DM1 | | MMAE |
| 225 | aHER2_scFv-CCD1-BSRS4-XTEN864- | 657 | aHER2_scFv-CCD1-BSRS4-XTEN864- |
| | DM1 | | MMAE |
| 226 | Folate-CCD1-BSRS4-XTEN864-DM1 | 658 | Folate-CCD1-BSRS4-XTEN864-MMAE |
| 227 | aCEA_scFv-CCD1-BSRS4-XTEN864- | 659 | aCEA_scFv-CCD1-BSRS4-XTEN864-MMAE |
| | DM1 | | |
| 228 | aEpCAM_scFv-CCD1-BSRS4-XTEN864- | 660 | aEpCAM_scFv-CCD1-BSRS4-XTEN864- |
| | DM1 | | MMAE |
| 229 | aHER2_scFv-CCD7-BSRS4-XTEN864- | 661 | aHER2_scFv-CCD7-BSRS4-XTEN864- |
| | DM1 | | MMAE |
| 230 | Folate-CCD7-BSRS4-XTEN864-DM1 | 662 | Folate-CCD7-BSRS4-XTEN864-MMAE |
| 231 | aCEA_scFv-CCD7-BSRS4-XTEN864- | 663 | aCEA_scFv-CCD7-BSRS4-XTEN864-MMAE |
| | DM1 | | |
| 232 | aEpCAM_scFv-CCD7-BSRS4-XTEN864- | 664 | aEpCAM_scFv-CCD7-BSRS4-XTEN864- |
| | DM1 | | MMAE |
| 233 | aHER2_scFv-CCD12-BSRS4-XTEN864- | 665 | aHER2_scFv-CCD12-BSRS4-XTEN864- |
| | DM1 | | MMAE |
| 234 | Folate-CCD12-BSRS4-XTEN864-DM1 | 666 | Folate-CCD12-BSRS4-XTEN864-MMAE |
| 235 | aCEA_scFv-CCD12-BSRS4-XTEN864- | 667 | aCEA_scFv-CCD12-BSRS4-XTEN864- |
| | DM1 | | MMAE |
| 236 | aEpCAM_scFv-CCD12-BSRS4-XTEN864- | 668 | aEpCAM_scFv-CCD12-BSRS4-XTEN864- |
| | DM1 | | MMAE |
| 237 | aHER2_scFv-CCD16-BSRS4-XTEN864- | 669 | aHER2_scFv-CCD16-BSRS4-XTEN864- |
| | DM1 | | MMAE |
| 238 | Folate-CCD16-BSRS4-XTEN864-DM1 | 670 | Folate-CCD16-BSRS4-XTEN864-MMAE |
| 239 | aCEA_scFv-CCD16-BSRS4-XTEN864- | 671 | aCEA_scFv-CCD16-BSRS4-XTEN864- |
| | DM1 | | MMAE |
| 240 | aEpCAM_scFv-CCD16-BSRS4-XTEN864- | 672 | aEpCAM_scFv-CCD16-BSRS4-XTEN864- |
| | DM1 | | MMAE |
| 241 | aHER2_scFv-CCD50-BSRS5-XTEN864- | 673 | aHER2_scFv-CCD50-BSRS5-XTEN864- |
| | DM1 | | MMAE |
| 242 | Folate-CCD50-BSRS5-XTEN864-DM1 | 674 | Folate-CCD50-BSRS5-XTEN864-MMAE |
| 243 | aCEA_scFv-CCD50-BSRS5-XTEN864- | 675 | aCEA_scFv-CCD50-BSRS5-XTEN864- |
| | DM1 | | MMAE |
| 244 | aEpCAM_scFv-CCD50-BSRS5-XTEN864- | 676 | aEpCAM_scFv-CCD50-BSRS5-XTEN864- |
| | DM1 | | MMAE |
| 245 | aHER2_scFv-CCD51-BSRS5-XTEN864- | 677 | aHER2_scFv-CCD51-BSRS5-XTEN864- |
| | DM1 | | MMAE |
| 246 | Folate-CCD51-BSRS5-XTEN864-DM1 | 678 | Folate-CCD51-BSRS5-XTEN864-MMAE |
| 247 | aCEA_scFv-CCD51-BSRS5-XTEN864- | 679 | aCEA_scFv-CCD51-BSRS5-XTEN864- |
| | DM1 | | MMAE |
| 248 | aEpCAM_scFv-CCD51-BSRS5-XTEN864- | 680 | aEpCAM_scFv-CCD51-BSRS5-XTEN864- |
| | DM1 | | MMAE |
| 249 | aHER2_scFv-CCD1-BSRS5-XTEN864- | 681 | aHER2_scFv-CCD1-BSRS5-XTEN864- |
| | DM1 | | MMAE |
| 250 | Folate-CCD1-BSRS5-XTEN864-DM1 | 682 | Folate-CCD1-BSRS5-XTEN864-MMAE |
| 251 | aCEA_scFv-CCD1-BSRS5-XTEN864- | 683 | aCEA_scFv-CCD1-BSRS5-XTEN864-MMAE |
| | DM1 | | |
| 252 | aEpCAM_scFv-CCD1-BSRS5-XTEN864- | 684 | aEpCAM_scFv-CCD1-BSRS5-XTEN864- |
| | DM1 | | MMAE |
| 253 | aHER2_scFv-CCD7-BSRS5-XTEN864- | 685 | aHER2_scFv-CCD7-BSRS5-XTEN864- |
| | DM1 | | MMAE |
| 254 | Folate-CCD7-BSRS5-XTEN864-DM1 | 686 | Folate-CCD7-BSRS5-XTEN864-MMAE |
| 255 | aCEA_scFv-CCD7-BSRS5-XTEN864- | 687 | aCEA_scFv-CCD7-BSRS5-XTEN864-MMAE |
| | DM1 | | |
| 256 | aEpCAM_scFv-CCD7-BSRS5-XTEN864- | 688 | aEpCAM_scFv-CCD7-BSRS5-XTEN864- |
| | DM1 | | MMAE |
| 257 | aHER2_scFv-CCD12-BSRS5-XTEN864- | 689 | aHER2_scFv-CCD12-BSRS5-XTEN864- |
| | DM1 | | MMAE |
| 258 | Folate-CCD12-BSRS5-XTEN864-DM1 | 690 | Folate-CCD12-BSRS5-XTEN864-MMAE |
| 259 | aCEA_scFv-CCD12-BSRS5-XTEN864- | 691 | aCEA_scFv-CCD12-BSRS5-XTEN864- |
| | DM1 | | MMAE |
| 260 | aEpCAM_scFv-CCD12-BSRS5-XTEN864- | 692 | aEpCAM_scFv-CCD12-BSRS5-XTEN864- |
| | DM1 | | MMAE |
| 261 | aHER2_scFv-CCD16-BSRS5-XTEN864- | 693 | aHER2_scFv-CCD16-BSRS5-XTEN864- |
| | DM1 | | MMAE |
| 262 | Folate-CCD16-BSRS5-XTEN864-DM1 | 694 | Folate-CCD16-BSRS5-XTEN864-MMAE |
| 263 | aCEA_scFv-CCD16-BSRS5-XTEN864- | 695 | aCEA_scFv-CCD16-BSRS5-XTEN864- |
| | DM1 | | MMAE |
| 264 | aEpCAM_scFv-CCD16-BSRS5-XTEN864- | 696 | aEpCAM_scFv-CCD16-BSRS5-XTEN864- |
| | DM1 | | MMAE |
| 265 | aHER2_scFv-CCD50-BSRS6-XTEN864- | 697 | aHER2_scFv-CCD50-BSRS6-XTEN864- |
| | DM1 | | MMAE |
| 266 | Folate-CCD50-BSRS6-XTEN864-DM1 | 698 | Folate-CCD50-BSRS6-XTEN864-MMAE |
| 267 | aCEA_scFv-CCD50-BSRS6-XTEN864- | 699 | aCEA_scFv-CCD50-BSRS6-XTEN864- |
| | DM1 | | MMAE |
| 268 | aEpCAM_scFv-CCD50-BSRS6-XTEN864- | 700 | aEpCAM_scFv-CCD50-BSRS6-XTEN864- |
| | DM1 | | MMAE |
| 269 | aHER2_scFv-CCD51-BSRS6-XTEN864- | 701 | aHER2_scFv-CCD51-BSRS6-XTEN864- |
| | DM1 | | MMAE |
| 270 | Folate-CCD51-BSRS6-XTEN864-DM1 | 702 | Folate-CCD51-BSRS6-XTEN864-MMAE |
| 271 | aCEA_scFv-CCD51-BSRS6-XTEN864- | 703 | aCEA_scFv-CCD51-BSRS6-XTEN864- |
| | DM1 | | MMAE |
| 272 | aEpCAM_scFv-CCD51-BSRS6-XTEN864- | 704 | aEpCAM_scFv-CCD51-BSRS6-XTEN864- |
| | DM1 | | MMAE |
| 273 | aHER2_scFv-CCD1-BSRS6-XTEN864- | 705 | aHER2_scFv-CCD1-BSRS6-XTEN864- |
| | DM1 | | MMAE |
| 274 | Folate-CCD1-BSRS6-XTEN864-DM1 | 706 | Folate-CCD1-BSRS6-XTEN864-MMAE |
| 275 | aCEA_scFv-CCD1-BSRS6-XTEN864- | 707 | aCEA_scFv-CCD1-BSRS6-XTEN864-MMAE |
| | DM1 | | |
| 276 | aEpCAM_scFv-CCD1-BSRS6-XTEN864- | 708 | aEpCAM_scFv-CCD1-BSRS6-XTEN864- |
| | DM1 | | MMAE |
| 277 | aHER2_scFv-CCD7-BSRS6-XTEN864- | 709 | aHER2_scFv-CCD7-BSRS6-XTEN864- |
| | DM1 | | MMAE |
| 278 | Folate-CCD7-BSRS6-XTEN864-DM1 | 710 | Folate-CCD7-BSRS6-XTEN864-MMAE |
| 279 | aCEA_scFv-CCD7-BSRS6-XTEN864- | 711 | aCEA_scFv-CCD7-BSRS6-XTEN864-MMAE |
| | DM1 | | |
| 280 | aEpCAM_scFv-CCD7-BSRS6-XTEN864- | 712 | aEpCAM_scFv-CCD7-BSRS6-XTEN864- |
| | DM1 | | MMAE |
| 281 | aHER2_scFv-CCD12-BSRS6-XTEN864- | 713 | aHER2_scFv-CCD12-BSRS6-XTEN864- |
| | DM1 | | MMAE |
| 282 | Folate-CCD12-BSRS6-XTEN864-DM1 | 714 | Folate-CCD12-BSRS6-XTEN864-MMAE |
| 283 | aCEA_scFv-CCD12-BSRS6-XTEN864- | 715 | aCEA_scFv-CCD12-BSRS6-XTEN864- |
| | DM1 | | MMAE |
| 284 | aEpCAM_scFv-CCD12-BSRS6-XTEN864- | 716 | aEpCAM_scFv-CCD12-BSRS6-XTEN864- |
| | DM1 | | MMAE |
| 285 | aHER2_scFv-CCD16-BSRS6-XTEN864- | 717 | aHER2_scFv-CCD16-BSRS6-XTEN864- |
| | DM1 | | MMAE |
| 286 | Folate-CCD16-BSRS6-XTEN864-DM1 | 718 | Folate-CCD16-BSRS6-XTEN864-MMAE |
| 287 | aCEA_scFv-CCD16-BSRS6-XTEN864- | 719 | aCEA_scFv-CCD16-BSRS6-XTEN864- |
| | DM1 | | MMAE |
| 288 | aEpCAM_scFv-CCD16-BSRS6-XTEN864- | 720 | aEpCAM_scFv-CCD16-BSRS6-XTEN864- |
| | DM1 | | MMAE |
| 289 | aHER2_scFv-CCD50-BSRS1-XTEN576- | 721 | aHER2_scFv-CCD50-BSRS1-XTEN576- |
| | DM1 | | MMAE |
| 290 | Folate-CCD50-BSRS1-XTEN576-DM1 | 722 | Folate-CCD50-BSRS1-XTEN576-MMAE |
| 291 | aCEA_scFv-CCD50-BSRS1-XTEN576- | 723 | aCEA_scFv-CCD50-BSRS1-XTEN576- |
| | DM1 | | MMAE |
| 292 | aEpCAM_scFv-CCD50-BSRS1-XTEN576- | 724 | aEpCAM_scFv-CCD50-BSRS1-XTEN576- |
| | DM1 | | MMAE |
| 293 | aHER2_scFv-CCD51-BSRS1-XTEN576- | 725 | aHER2_scFv-CCD51-BSRS1-XTEN576- |
| | DM1 | | MMAE |
| 294 | Folate-CCD51-BSRS1-XTEN576-DM1 | 726 | Folate-CCD51-BSRS1-XTEN576-MMAE |
| 295 | aCEA_scFv-CCD51-BSRS1-XTEN576- | 727 | aCEA_scFv-CCD51-BSRS1-XTEN576- |
| | DM1 | | MMAE |
| 296 | aEpCAM_scFv-CCD51-BSRS1-XTEN576- | 728 | aEpCAM_scFv-CCD51-BSRS1-XTEN576- |
| | DM1 | | MMAE |
| 297 | aHER2_scFv-CCD1-BSRS1-XTEN576- | 729 | aHER2_scFv-CCD1-BSRS1-XTEN576- |
| | DM1 | | MMAE |
| 298 | Folate-CCD1-BSRS1-XTEN576-DM1 | 730 | Folate-CCD1-BSRS1-XTEN576-MMAE |
| 299 | aCEA_scFv-CCD1-BSRS1-XTEN576- | 731 | aCEA_scFv-CCD1-BSRS1-XTEN576-MMAE |
| | DM1 | | |
| 300 | aEpCAM_scFv-CCD1-BSRS1-XTEN576- | 732 | aEpCAM_scFv-CCD1-BSRS1-XTEN576- |
| | DM1 | | MMAE |
| 301 | aHER2_scFv-CCD7-BSRS1-XTEN576- | 733 | aHER2_scFv-CCD7-BSRS1-XTEN576- |
| | DM1 | | MMAE |
| 302 | Folate-CCD7-BSRS1-XTEN576-DM1 | 734 | Folate-CCD7-BSRS1-XTEN576-MMAE |
| 303 | aCEA_scFv-CCD7-BSRS1-XTEN576- | 735 | aCEA_scFv-CCD7-BSRS1-XTEN576-MMAE |
| | DM1 | | |
| 304 | aEpCAM_scFv-CCD7-BSRS1-XTEN576- | 736 | aEpCAM_scFv-CCD7-BSRS1-XTEN576- |
| | DM1 | | MMAE |
| 305 | aHER2_scFv-CCD12-BSRS1-XTEN576- | 737 | aHER2_scFv-CCD12-BSRS1-XTEN576- |
| | DM1 | | MMAE |
| 306 | Folate-CCD12-BSRS1-XTEN576-DM1 | 738 | Folate-CCD12-BSRS1-XTEN576-MMAE |
| 307 | aCEA_scFv-CCD12-BSRS1-XTEN576- | 739 | aCEA_scFv-CCD12-BSRS1-XTEN576- |
| | DM1 | | MMAE |
| 308 | aEpCAM_scFv-CCD12-BSRS1-XTEN576- | 740 | aEpCAM_scFv-CCD12-BSRS1-XTEN576- |
| | DM1 | | MMAE |
| 309 | aHER2_scFv-CCD16-BSRS1-XTEN576- | 741 | aHER2_scFv-CCD16-BSRS1-XTEN576- |
| | DM1 | | MMAE |
| 310 | Folate-CCD16-BSRS1-XTEN576-DM1 | 742 | Folate-CCD16-BSRS1-XTEN576-MMAE |
| 311 | aCEA_scFv-CCD16-BSRS1-XTEN576- | 743 | aCEA_scFv-CCD16-BSRS1-XTEN576- |
| | DM1 | | MMAE |
| 312 | aEpCAM_scFv-CCD16-BSRS1-XTEN576- | 744 | aEpCAM_scFv-CCD16-BSRS1-XTEN576- |
| | DM1 | | MMAE |
| 313 | aHER2_scFv-CCD50-BSRS2-XTEN576- | 745 | aHER2_scFv-CCD50-BSRS2-XTEN576- |
| | DM1 | | MMAE |
| 314 | Folate-CCD50-BSRS2-XTEN576-DM1 | 746 | Folate-CCD50-BSRS2-XTEN576-MMAE |
| 315 | aCEA_scFv-CCD50-BSRS2-XTEN576- | 747 | aCEA_scFv-CCD50-BSRS2-XTEN576- |
| | DM1 | | MMAE |
| 316 | aEpCAM_scFv-CCD50-BSRS2-XTEN576- | 748 | aEpCAM_scFv-CCD50-BSRS2-XTEN576- |
| | DM1 | | MMAE |
| 317 | aHER2_scFv-CCD51-BSRS2-XTEN576- | 749 | aHER2_scFv-CCD51-BSRS2-XTEN576- |
| | DM1 | | MMAE |
| 318 | Folate-CCD51-BSRS2-XTEN576-DM1 | 750 | Folate-CCD51-BSRS2-XTEN576-MMAE |
| 319 | aCEA_scFv-CCD51-BSRS2-XTEN576- | 751 | aCEA_scFv-CCD51-BSRS2-XTEN576- |
| | DM1 | | MMAE |
| 320 | aEpCAM_scFv-CCD51-BSRS2-XTEN576- | 752 | aEpCAM_scFv-CCD51-BSRS2-XTEN576- |
| | DM1 | | MMAE |
| 321 | aHER2_scFv-CCD1-BSRS2-XTEN576- | 753 | aHER2_scFv-CCD1-BSRS2-XTEN576- |
| | DM1 | | MMAE |
| 322 | Folate-CCD1-BSRS2-XTEN576-DM1 | 754 | Folate-CCD1-BSRS2-XTEN576-MMAE |
| 323 | aCEA_scFv-CCD1-BSRS2-XTEN576- | 755 | aCEA_scFv-CCD1-BSRS2-XTEN576-MMAE |
| | DM1 | | |
| 324 | aEpCAM_scFv-CCD1-BSRS2-XTEN576- | 756 | aEpCAM_scFv-CCD1-BSRS2-XTEN576- |
| | DM1 | | MMAE |
| 325 | aHER2_scFv-CCD7-BSRS2-XTEN576- | 757 | aHER2_scFv-CCD7-BSRS2-XTEN576- |
| | DM1 | | MMAE |
| 326 | Folate-CCD7-BSRS2-XTEN576-DM1 | 758 | Folate-CCD7-BSRS2-XTEN576-MMAE |
| 327 | aCEA_scFv-CCD7-BSRS2-XTEN576- | 759 | aCEA_scFv-CCD7-BSRS2-XTEN576-MMAE |
| | DM1 | | |
| 328 | aEpCAM_scFv-CCD7-BSRS2-XTEN576- | 760 | aEpCAM_scFv-CCD7-BSRS2-XTEN576- |
| | DM1 | | MMAE |
| 329 | aHER2_scFv-CCD12-BSRS2-XTEN576- | 761 | aHER2_scFv-CCD12-BSRS2-XTEN576- |
| | DM1 | | MMAE |
| 330 | Folate-CCD12-BSRS2-XTEN576-DM1 | 762 | Folate-CCD12-BSRS2-XTEN576-MMAE |
| 331 | aCEA_scFv-CCD12-BSRS2-XTEN576- | 763 | aCEA_scFv-CCD12-BSRS2-XTEN576- |
| | DM1 | | MMAE |
| 332 | aEpCAM_scFv-CCD12-BSRS2-XTEN576- | 764 | aEpCAM_scFv-CCD12-BSRS2-XTEN576- |
| | DM1 | | MMAE |
| 333 | aHER2_scFv-CCD16-BSRS2-XTEN576- | 765 | aHER2_scFv-CCD16-BSRS2-XTEN576- |
| | DM1 | | MMAE |
| 334 | Folate-CCD16-BSRS2-XTEN576-DM1 | 766 | Folate-CCD16-BSRS2-XTEN576-MMAE |
| 335 | aCEA_scFv-CCD16-BSRS2-XTEN576- | 767 | aCEA_scFv-CCD16-BSRS2-XTEN576- |
| | DM1 | | MMAE |
| 336 | aEpCAM_scFv-CCD16-BSRS2-XTEN576- | 768 | aEpCAM_scFv-CCD16-BSRS2-XTEN576- |
| | DM1 | | MMAE |
| 337 | aHER2_scFv-CCD50-BSRS3-XTEN576- | 769 | aHER2_scFv-CCD50-BSRS3-XTEN576- |
| | DM1 | | MMAE |
| 338 | Folate-CCD50-BSRS3-XTEN576-DM1 | 770 | Folate-CCD50-BSRS3-XTEN576-MMAE |
| 339 | aCEA_scFv-CCD50-BSRS3-XTEN576- | 771 | aCEA_scFv-CCD50-BSRS3-XTEN576- |
| | DM1 | | MMAE |
| 340 | aEpCAM_scFv-CCD50-BSRS3-XTEN576- | 772 | aEpCAM_scFv-CCD50-BSRS3-XTEN576- |
| | DM1 | | MMAE |
| 341 | aHER2_scFv-CCD51-BSRS3-XTEN576- | 773 | aHER2_scFv-CCD51-BSRS3-XTEN576- |
| | DM1 | | MMAE |
| 342 | Folate-CCD51-BSRS3-XTEN576-DM1 | 774 | Folate-CCD51-BSRS3-XTEN576-MMAE |
| 343 | aCEA_scFv-CCD51-BSRS3-XTEN576- | 775 | aCEA_scFv-CCD51-BSRS3-XTEN576- |
| | DM1 | | MMAE |
| 344 | aEpCAM_scFv-CCD51-BSRS3-XTEN576- | 776 | aEpCAM_scFv-CCD51-BSRS3-XTEN576- |
| | DM1 | | MMAE |
| 345 | aHER2_scFv-CCD1-BSRS3-XTEN576- | 777 | aHER2_scFv-CCD1-BSRS3-XTEN576- |
| | DM1 | | MMAE |
| 346 | Folate-CCD1-BSRS3-XTEN576-DM1 | 778 | Folate-CCD1-BSRS3-XTEN576-MMAE |
| 347 | aCEA_scFv-CCD1-BSRS3-XTEN576- | 779 | aCEA_scFv-CCD1-BSRS3-XTEN576-MMAE |
| | DM1 | | |
| 348 | aEpCAM_scFv-CCD1-BSRS3-XTEN576- | 780 | aEpCAM_scFv-CCD1-BSRS3-XTEN576- |
| | DM1 | | MMAE |
| 349 | aHER2_scFv-CCD7-BSRS3-XTEN576- | 781 | aHER2_scFv-CCD7-BSRS3-XTEN576- |
| | DM1 | | MMAE |
| 350 | Folate-CCD7-BSRS3-XTEN576-DM1 | 782 | Folate-CCD7-BSRS3-XTEN576-MMAE |
| 351 | aCEA_scFv-CCD7-BSRS3-XTEN576- | 783 | aCEA_scFv-CCD7-BSRS3-XTEN576-MMAE |
| | DM1 | | |
| 352 | aEpCAM_scFv-CCD7-BSRS3-XTEN576- | 784 | aEpCAM_scFv-CCD7-BSRS3-XTEN576- |
| | DM1 | | MMAE |
| 353 | aHER2_scFv-CCD12-BSRS3-XTEN576- | 785 | aHER2_scFv-CCD12-BSRS3-XTEN576- |
| | DM1 | | MMAE |
| 354 | Folate-CCD12-BSRS3-XTEN576-DM1 | 786 | Folate-CCD12-BSRS3-XTEN576-MMAE |
| 355 | aCEA_scFv-CCD12-BSRS3-XTEN576- | 787 | aCEA_scFv-CCD12-BSRS3-XTEN576- |
| | DM1 | | MMAE |
| 356 | aEpCAM_scFv-CCD12-BSRS3-XTEN576- | 788 | aEpCAM_scFv-CCD12-BSRS3-XTEN576- |
| | DM1 | | MMAE |
| 357 | aHER2_scFv-CCD16-BSRS3-XTEN576- | 789 | aHER2_scFv-CCD16-BSRS3-XTEN576- |
| | DM1 | | MMAE |
| 358 | Folate-CCD16-BSRS3-XTEN576-DM1 | 790 | Folate-CCD16-BSRS3-XTEN576-MMAE |
| 359 | aCEA_scFv-CCD16-BSRS3-XTEN576- | 791 | aCEA_scFv-CCD16-BSRS3-XTEN576- |
| | DM1 | | MMAE |
| 360 | aEpCAM_scFv-CCD16-BSRS3-XTEN576- | 792 | aEpCAM_scFv-CCD16-BSRS3-XTEN576- |
| | DM1 | | MMAE |
| 361 | aHER2_scFv-CCD50-BSRS4-XTEN576- | 793 | aHER2_scFv-CCD50-BSRS4-XTEN576- |
| | DM1 | | MMAE |
| 362 | Folate-CCD50-BSRS4-XTEN576-DM1 | 794 | Folate-CCD50-BSRS4-XTEN576-MMAE |
| 363 | aCEA_scFv-CCD50-BSRS4-XTEN576- | 795 | aCEA_scFv-CCD50-BSRS4-XTEN576- |
| | DM1 | | MMAE |
| 364 | aEpCAM_scFv-CCD50-BSRS4-XTEN576- | 796 | aEpCAM_scFv-CCD50-BSRS4-XTEN576- |
| | DM1 | | MMAE |
| 365 | aHER2_scFv-CCD51-BSRS4-XTEN576- | 797 | aHER2_scFv-CCD51-BSRS4-XTEN576- |
| | DM1 | | MMAE |
| 366 | Folate-CCD51-BSRS4-XTEN576-DM1 | 798 | Folate-CCD51-BSRS4-XTEN576-MMAE |
| 367 | aCEA_scFv-CCD51-BSRS4-XTEN576- | 799 | aCEA_scFv-CCD51-BSRS4-XTEN576- |
| | DM1 | | MMAE |
| 368 | aEpCAM_scFv-CCD51-BSRS4-XTEN576- | 800 | aEpCAM_scFv-CCD51-BSRS4-XTEN576- |
| | DM1 | | MMAE |
| 369 | aHER2_scFv-CCD1-BSRS4-XTEN576- | 801 | aHER2_scFv-CCD1-BSRS4-XTEN576- |
| | DM1 | | MMAE |
| 370 | Folate-CCD1-BSRS4-XTEN576-DM1 | 802 | Folate-CCD1-BSRS4-XTEN576-MMAE |
| 371 | aCEA_scFv-CCD1-BSRS4-XTEN576- | 803 | aCEA_scFv-CCD1-BSRS4-XTEN576-MMAE |
| | DM1 | | |
| 372 | aEpCAM_scFv-CCD1-BSRS4-XTEN576- | 804 | aEpCAM_scFv-CCD1-BSRS4-XTEN576- |
| | DM1 | | MMAE |
| 373 | aHER2_scFv-CCD7-BSRS4-XTEN576- | 805 | aHER2_scFv-CCD7-BSRS4-XTEN576- |
| | DM1 | | MMAE |
| 374 | Folate-CCD7-BSRS4-XTEN576-DM1 | 806 | Folate-CCD7-BSRS4-XTEN576-MMAE |
| 375 | aCEA_scFv-CCD7-BSRS4-XTEN576- | 807 | aCEA_scFv-CCD7-BSRS4-XTEN576-MMAE |
| | DM1 | | |
| 376 | aEpCAM_scFv-CCD7-BSRS4-XTEN576- | 808 | aEpCAM_scFv-CCD7-BSRS4-XTEN576- |
| | DM1 | | MMAE |
| 377 | aHER2_scFv-CCD12-BSRS4-XTEN576- | 809 | aHER2_scFv-CCD12-BSRS4-XTEN576- |
| | DM1 | | MMAE |
| 378 | Folate-CCD12-BSRS4-XTEN576-DM1 | 810 | Folate-CCD12-BSRS4-XTEN576-MMAE |
| 379 | aCEA_scFv-CCD12-BSRS4-XTEN576- | 811 | aCEA_scFv-CCD12-BSRS4-XTEN576- |
| | DM1 | | MMAE |
| 380 | aEpCAM_scFv-CCD12-BSRS4-XTEN576- | 812 | aEpCAM_scFv-CCD12-BSRS4-XTEN576- |
| | DM1 | | MMAE |
| 381 | aHER2_scFv-CCD16-BSRS4-XTEN576- | 813 | aHER2_scFv-CCD16-BSRS4-XTEN576- |
| | DM1 | | MMAE |
| 382 | Folate-CCD16-BSRS4-XTEN576-DM1 | 814 | Folate-CCD16-BSRS4-XTEN576-MMAE |
| 383 | aCEA_scFv-CCD16-BSRS4-XTEN576- | 815 | aCEA_scFv-CCD16-BSRS4-XTEN576- |
| | DM1 | | MMAE |
| 384 | aEpCAM_scFv-CCD16-BSRS4-XTEN576- | 816 | aEpCAM_scFv-CCD16-BSRS4-XTEN576- |
| | DM1 | | MMAE |
| 385 | aHER2_scFv-CCD50-BSRS5-XTEN576- | 817 | aHER2_scFv-CCD50-BSRS5-XTEN576- |
| | DM1 | | MMAE |
| 386 | Folate-CCD50-BSRS5-XTEN576-DM1 | 818 | Folate-CCD50-BSRS5-XTEN576-MMAE |
| 387 | aCEA_scFv-CCD50-BSRS5-XTEN576- | 819 | aCEA_scFv-CCD50-BSRS5-XTEN576- |
| | DM1 | | MMAE |
| 388 | aEpCAM_scFv-CCD50-BSRS5-XTEN576- | 820 | aEpCAM_scFv-CCD50-BSRS5-XTEN576- |
| | DM1 | | MMAE |
| 389 | aHER2_scFv-CCD51-BSRS5-XTEN576- | 821 | aHER2_scFv-CCD51-BSRS5-XTEN576- |
| | DM1 | | MMAE |
| 390 | Folate-CCD51-BSRS5-XTEN576-DM1 | 822 | Folate-CCD51-BSRS5-XTEN576-MMAE |
| 391 | aCEA_scFv-CCD51-BSRS5-XTEN576- | 823 | aCEA_scFv-CCD51-BSRS5-XTEN576- |
| | DM1 | | MMAE |
| 392 | aEpCAM_scFv-CCD51-BSRS5-XTEN576- | 824 | aEpCAM_scFv-CCD51-BSRS5-XTEN576- |
| | DM1 | | MMAE |
| 393 | aHER2_scFv-CCD1-BSRS5-XTEN576- | 825 | aHER2_scFv-CCD1-BSRS5-XTEN576- |
| | DM1 | | MMAE |
| 394 | Folate-CCD1-BSRS5-XTEN576-DM1 | 826 | Folate-CCD1-BSRS5-XTEN576-MMAE |
| 395 | aCEA_scFv-CCD1-BSRS5-XTEN576- | 827 | aCEA_scFv-CCD1-BSRS5-XTEN576-MMAE |
| | DM1 | | |
| 396 | aEpCAM_scFv-CCD1-BSRS5-XTEN576- | 828 | aEpCAM_scFv-CCD1-BSRS5-XTEN576- |
| | DM1 | | MMAE |
| 397 | aHER2_scFv-CCD7-BSRS5-XTEN576- | 829 | aHER2_scFv-CCD7-BSRS5-XTEN576- |
| | DM1 | | MMAE |
| 398 | Folate-CCD7-BSRS5-XTEN576-DM1 | 830 | Folate-CCD7-BSRS5-XTEN576-MMAE |
| 399 | aCEA_scFv-CCD7-BSRS5-XTEN576- | 831 | aCEA_scFv-CCD7-BSRS5-XTEN576-MMAE |
| | DM1 | | |
| 400 | aEpCAM_scFv-CCD7-BSRS5-XTEN576- | 832 | aEpCAM_scFv-CCD7-BSRS5-XTEN576- |
| | DM1 | | MMAE |
| 401 | aHER2_scFv-CCD12-BSRS5-XTEN576- | 833 | aHER2_scFv-CCD12-BSRS5-XTEN576- |
| | DM1 | | MMAE |
| 402 | Folate-CCD12-BSRS5-XTEN576-DM1 | 834 | Folate-CCD12-BSRS5-XTEN576-MMAE |
| 403 | aCEA_scFv-CCD12-BSRS5-XTEN576- | 835 | aCEA_scFv-CCD12-BSRS5-XTEN576- |
| | DM1 | | MMAE |
| 404 | aEpCAM_scFv-CCD12-BSRS5-XTEN576- | 836 | aEpCAM_scFv-CCD12-BSRS5-XTEN576- |
| | DM1 | | MMAE |
| 405 | aHER2_scFv-CCD16-BSRS5-XTEN576- | 837 | aHER2_scFv-CCD16-BSRS5-XTEN576- |
| | DM1 | | MMAE |
| 406 | Folate-CCD16-BSRS5-XTEN576-DM1 | 838 | Folate-CCD16-BSRS5-XTEN576-MMAE |
| 407 | aCEA_scFv-CCD16-BSRS5-XTEN576- | 839 | aCEA_scFv-CCD16-BSRS5-XTEN576- |
| | DM1 | | MMAE |
| 408 | aEpCAM_scFv-CCD16-BSRS5-XTEN576- | 840 | aEpCAM_scFv-CCD16-BSRS5-XTEN576- |
| | DM1 | | MMAE |
| 409 | aHER2_scFv-CCD50-BSRS6-XTEN576- | 841 | aHER2_scFv-CCD50-BSRS6-XTEN576- |
| | DM1 | | MMAE |
| 410 | Folate-CCD50-BSRS6-XTEN576-DM1 | 842 | Folate-CCD50-BSRS6-XTEN576-MMAE |
| 411 | aCEA_scFv-CCD50-BSRS6-XTEN576- | 843 | aCEA_scFv-CCD50-BSRS6-XTEN576- |
| | DM1 | | MMAE |
| 412 | aEpCAM_scFv-CCD50-BSRS6-XTEN576- | 844 | aEpCAM_scFv-CCD50-BSRS6-XTEN576- |
| | DM1 | | MMAE |
| 413 | aHER2_scFv-CCD51-BSRS6-XTEN576- | 845 | aHER2_scFv-CCD51-BSRS6-XTEN576- |
| | DM1 | | MMAE |
| 414 | Folate-CCD51-BSRS6-XTEN576-DM1 | 846 | Folate-CCD51-BSRS6-XTEN576-MMAE |
| 415 | aCEA_scFv-CCD51-BSRS6-XTEN576- | 847 | aCEA_scFv-CCD51-BSRS6-XTEN576- |
| | DM1 | | MMAE |
| 416 | aEpCAM_scFv-CCD51-BSRS6-XTEN576- | 848 | aEpCAM_scFv-CCD51-BSRS6-XTEN576- |
| | DM1 | | MMAE |
| 417 | aHER2_scFv-CCD1-BSRS6-XTEN576- | 849 | aHER2_scFv-CCD1-BSRS6-XTEN576- |
| | DM1 | | MMAE |
| 418 | Folate-CCD1-BSRS6-XTEN576-DM1 | 850 | Folate-CCD1-BSRS6-XTEN576-MMAE |
| 419 | aCEA_scFv-CCD1-BSRS6-XTEN576- | 851 | aCEA_scFv-CCD1-BSRS6-XTEN576-MMAE |
| | DM1 | | |
| 420 | aEpCAM_scFv-CCD1-BSRS6-XTEN576- | 852 | aEpCAM_scFv-CCD1-BSRS6-XTEN576- |
| | DM1 | | MMAE |
| 421 | aHER2_scFv-CCD7-BSRS6-XTEN576- | 853 | aHER2_scFv-CCD7-BSRS6-XTEN576- |
| | DM1 | | MMAE |
| 422 | Folate-CCD7-BSRS6-XTEN576-DM1 | 854 | Folate-CCD7-BSRS6-XTEN576-MMAE |
| 423 | aCEA_scFv-CCD7-BSRS6-XTEN576- | 855 | aCEA_scFv-CCD7-BSRS6-XTEN576-MMAE |
| | DM1 | | |
| 424 | aEpCAM_scFv-CCD7-BSRS6-XTEN576- | 856 | aEpCAM_scFv-CCD7-BSRS6-XTEN576- |
| | DM1 | | MMAE |
| 425 | aHER2_scFv-CCD12-BSRS6-XTEN576- | 857 | aHER2_scFv-CCD12-BSRS6-XTEN576- |
| | DM1 | | MMAE |
| 426 | Folate-CCD12-BSRS6-XTEN576-DM1 | 858 | Folate-CCD12-BSRS6-XTEN576-MMAE |
| 427 | aCEA_scFv-CCD12-BSRS6-XTEN576- | 859 | aCEA_scFv-CCD12-BSRS6-XTEN576- |
| | DM1 | | MMAE |
| 428 | aEpCAM_scFv-CCD12-BSRS6-XTEN576- | 860 | aEpCAM_scFv-CCD12-BSRS6-XTEN576- |
| | DM1 | | MMAE |
| 429 | aHER2_scFv-CCD16-BSRS6-XTEN576- | 861 | aHER2_scFv-CCD16-BSRS6-XTEN576- |
| | DM1 | | MMAE |
| 430 | Folate-CCD16-BSRS6-XTEN576-DM1 | 862 | Folate-CCD16-BSRS6-XTEN576-MMAE |
| 431 | aCEA_scFv-CCD16-BSRS6-XTEN576- | 863 | aCEA_scFv-CCD16-BSRS6-XTEN576- |
| | DM1 | | MMAE |
| 432 | aEpCAM_scFv-CCD16-BSRS6-XTEN576- | 864 | aEpCAM_scFv-CCD16-BSRS6-XTEN576- |
| | DM1 | | MMAE |

*Provides the description of the individual components of the targeted conjugate compositions components
¹Provides the name of the targeting moiety wherein each TM other than folate comprises the VH and VL sequences of the indicated antibody as listed in Table 19 linked by a linker of Table 20.
²Provides the name of the cysteine cotaining domain of Table 6
³Provides the name of the PCM sequence of Table 8
⁴Provides the length of the XTEN of Table 10 (e.g., XTEN713 can be an AE713, AF713 or AG713)
⁵Provides the type of drug molecules conjugated to the CCD wherein the number of drug molecules is equal to the number of cysteine residues of the corresponding CCD of the composition

[0211] 2. Cysteine Containing Domains

[0212] In another aspect, the invention provides polypeptides of short length comprising one or more cysteine residues for the subject compositions to which the drug or biologic payloads described herein are conjugated using cross-linkers (described more fully, below) to link the payloads to the thiol groups of the cysteine residues. In some embodiments, the cysteine containing domains, or “CCD” are polypeptides of relatively short length, and typically comprise at least 6 amino acid residues. In some embodiments, a CCD has between 6 to about 144 amino acids, and between 1 to about 10, or more cysteine residues. Typically, the ratio of cysteine to non-cysteine residues in a CCD is higher than most naturally-occuring peptides and proteins. It is an object of the invention to provide CCD for incorporation into the the subject compositions of the disclosure that comprise targeting moieties, XTEN and, optionally, protease cleavage moieties, in which the fusion protein is specifically configured to locate CCD bearing the linked payload drugs or biologically active proteins in close proximity to the targeting moiety to better ensure that the full number of incorporated payload molecules are delivered to the cell bearing the ligand to which the targeting moiety can bind. While XTEN are not highly prone to proteolytic cleavage in the blood (as demonstrated in the Examples 29 and 48, below, and FIGS. 29 and 48), they are nevertheless susceptible to certain proteases, such as neutrophil elastase, MMP-2, and MMP-9, such that a composition comprising an XTEN administered to a subject is eventually cleaved and degraded by proteolysis over time. In order to optimize the delivery of the intended number of linked payloads to the target tissues, some CCD polypeptides were designed to provide short sequences that have up to 10 cysteine residues interspersed with hydrophilic amino acids. In some embodiments, the invention provides CCD for incorporation into the subject compositions that comprise at least one non-cysteine residue, wherein non-cysteine residues are selected from 3-6 types of amino acids selected the group consisting of glycine (G), alanine (A), serine (S), threonine (T), glutamate (E) and proline (P). In one embodiment, a CCD has 1 cysteine residue and up to 9 non-cysteine residues selected from 3-6 types of amino acids selected from the group consisting of glycine (G), alanine (A), serine (S), threonine (T), glutamate (E) and proline (P). In another embodiment, a CCD of the subject composition has 3 cysteine residues and up to 39 non-cysteine residues selected from the group consisting of 3-6 types of amino acids selected from glycine (G), alanine (A), serine (S), threonine (T), glutamate (E) and proline (P), wherein the cysteine residues can be contiguous or may be separated from another cysteine residue by up to 15 non-cysteine residues. In another embodiment, a CCD of the subject composition has 9 cysteine residues and up to 135 non-cysteine residues selected from the group consisting of glycine (G), alanine (A), serine (S), threonine (T), glutamate (E) and proline (P), wherein no two cysteine residues are contiguous and each cysteine residue may be separated from another cysteine residue by up to 15 non-cysteine residues in the CCD sequence. In another embodiment, a CCD of the subject composition has 1 to 9 cysteine residues and between 6 and 144 total residues (in which the non-cysteine residues are 3-6 types selected from the group consisting of glycine (G), alanine (A), serine (S), threonine (T), glutamate (E) and proline (P)) in which a cysteine residue is located within 2 to 9 residues of the N- or C-terminus of the CCD. In another embodiment, a CCD of the subject composition has 3 to 9 cysteine residues and between 14 and 144 total residues (in which the non-cysteine residues are 3-6 types selected from the group consisting of glycine (G), alanine (A), serine (S), threonine (T), glutamate (E) and proline (P)) and any 2 cysteine residues are separated by no more than 15 non-cysteine residues. In another embodiment, the invention provides CCD for incorporation into the subject compositions having a sequence with at least 90% sequence identity to a sequence selected from the group consisting of the sequences set forth in Table 6. In another embodiment, the invention provides CCD for incorporation into the subject compositions selected from the group consisting of the sequences set forth in Table 6. In another embodiment, the invention provides a fusion protein comprising a CCD having a sequence selected from the group consisting of the sequences set forth in Table 6 fused to a targeting moiety disclosed herein. In another embodiment, the invention provides a fusion protein comprising a CCD having a sequence selected from the group consisting of the sequences set forth in Table 6 fused between a targeting moiety and an XTEN disclosed herein. In another embodiment, the invention provides a fusion protein comprising a CCD having a sequence selected from the group consisting of the sequences set forth in Table 6 fused between a targeting moiety and a PCM disclosed herein. In another embodiment, the invention provides a fusion protein comprising a CCD having a sequence selected from the group consisting of the sequences set forth in Table 5, a targeting moiety, a PCM, and an XTEN disclosed herein. In another embodiment, the invention provides a fusion protein comprising a CCD having a sequence selected from the group consisting of the sequences set forth in Table 6, a PCM, and an XTEN disclosed herein, together with a targeting moiety conjugated to the N- or C-terminus of the CCD.

[0213] It is another object of the invention to provide CCD for incorporation into the subject compositions to enhance the ability to recover molecules of the compositions after a conjugation reaction wherein the composition has the full number of intended of payload drug or biologic molecules conjugated to each of the cysteine residues incorporated into the CCD. The invention takes advantage of the surprising discovery that in HPLC analyses drug conjugates of CCD-XTEN fusion proteins provide signically improved peak separation between conjugates having different numbers of drug molcules. The difference can be seen in reaction products comparing XTEN with incorporated cysteine residues spread evenly across the sequence (e.g., the cysteine engineered XTEN of Table 11) versus a fusion protein of an XTEN of Table 10 fused with a CCD with the same number of amino acids as the cysteine-engineer XTEN. The respective polypeptides were subjected to a conjugation reaction to link a given payload to the cysteines, and upon HPLC analysis, the reaction product of the fusion protein of the XTEN and the CCD had significantly greater peak separation with respect to the peak corresponding to the fully-conjugated reaction product relative to the peak corresponding to the underconjugated reaction product that was the closest to the fully conjugated reaction product peak, as compared to the separation of the corresponding peaks of the reaction products of the cysteine-containing XTEN conjugate. Stated differently, compositions comprising CCD with conjugated payload drug or biologically active proteins incorporated into a targeted conjugate composition are capable of achieving greater separation between peaks of the heterogenous conjugation reaction products on reversed-phase HPLC chromatography than the reaction products of a composition wherein the cysteine residues are more evenly distributed across the length of an XTEN of corresponding length not comprising a CCD.

[0214] The separation between the peak of the fully conjugated product to the next nearest under-conjugated product can be mathematically defined. As used herein, “Peak Separation” is defined as follows:

[0215] Peak Separation=(t_{R2}−t_{R1})/FWHM
[0216] wherein
   [0217] t_{R2}: retention time of the fully conjugated product peak by reverse phase HPLC;
   [0218] t_{R1}: retention time of the underconjugated peak that is closest to the fully conjugated product peak by reverse phase HPLC; and
   [0219] FWHM: full width at half maximum of the fully conjugated product peak
[0220] wherein the reversed-phase HPLC chromatography conditions are as follows:
   [0221] HPLC column is C4-HPLC column (Vydac, catalog number: 214TP5415 Vydac C4)
   [0222] Elution Method: 5-50% Buffer B in 45 minutes, 1 ml/min
   [0223] Buffer A: 0.1% TFA in H₂O
   [0224] Buffer B: 0.1% TFA in acetonitrile

[0225] In some embodiments, the invention provides targeted conjugate compositions wherein upon the conjugation between a drug molecule and the cysteine residues of the CCD of the fusion protein, a heterogeneous population of conjugate products is obtained wherein fully conjugated CCD-drug conjugate product is capable of achieving a Peak Separation ≥6 wherein: a) the fusion protein comprises a polypeptide having 600 or more cumulative amino acid residues comprising a CCD with between 3 to 9 cysteine residues; b) the heterogeneous conjugate products have a mixture of at least 1, 2, and 3 or more payloads linked to the CCD; and c) the heterogeneous population of conjugation products are analyzed under reversed-phase HPLC chromatography conditions. In one embodiment of the foregoing, the CCD of the fusion protein is a sequence of Table 6 having 3 cysteine residues and the fusion protein has at least 800 cumulative amino acid residues. In another embodiment of the foregoing, CCD of the fusion protein is a sequence of Table 6 having 9 cysteine residues and the fusion protein has at least 800 cumulative amino acid residues.

TABLE 6
Cysteine Containing Domains (CCD)
for conjugation to drug payload

| CCD | | AA | | SEQ | | SEQ |
|---|---|---|---|---|---|---|
| Desig- | Number | between | Amino Acid | ID | | ID |
| nation | of Cys | Cys | Sequence | NO: | DNA Sequence | NO: |
| CCD1 | 3 | 15 | GSPGAGSCAGSPTS | 26 | GGcTCTCCAggtgcAGGTA | 77 |
| | | | TEEGTSESACSPEG | | GCtgcGCTGGTAGCCCAAC | |
| | | | PGTSTEPSEGSCGG | | CTCTACCGAAGAAGGTACC | |
| | | | | | TCTGAATCCGCTtgTTCCC | |
| | | | | | CAGAAGGTCCTGGTACTAG | |
| | | | | | CACTGAGCCAAGCGAAGGT | |
| | | | | | TCTtgTGGCggt | |
| CCD2 | 3 | 10 | GSPGPAGCGAPGPS | 27 | GGcTCTCCAGGTCCGGCCG | 78 |
| | | | GGPTCTGSTSATPG | | GTtgcGGTGCACCGGGCCC | |
| | | | ACSA | | GAGTGGTGGTCCTACAtgt | |
| | | | | | ACCGGCAGTACCAGCGCAA | |
| | | | | | CACCTGGTGCAtgcAGCGC | |
| | | | | | C | |
| CCD3 | 3 | 15 | GSPGAGSCTETSPS | 28 | GGcTCTCCAggtgcAGGTA | 79 |
| | | | TPTESPEAGCSGSG | | GCtgtACGGAAACCAGCCC | |
| | | | SPESPSGTEASCTS | | GAGCACCCCGACCGAGTCC | |
| | | | | | CCGGAAGCGGGCtgcAGCG | |
| | | | | | GTAGCGGCAGCCCGGAGAG | |
| | | | | | CCCGAGCGGTACCGAGGCG | |
| | | | | | AGCtgtACGTCC | |
| CCD4 | 3 | 10 | GSPGAGSCTETSPS | 29 | GGcTCTCCAggtgcAGGTA | 80 |
| | | | TPTSCPEAGSGSGS | | GCtgtACGGAAACCAGCCC | |
| | | | PCSP | | GAGCACCCCGACCTCCtgc | |
| | | | | | CCGGAAGCGGGCAGCGGTA | |
| | | | | | GCGGCAGCCCGtgtAGCCC | |
| | | | | | G | |
| CCD5 | 3 | 7 | GSPGAGSCTETSPS | 30 | GGcTCTCCAggtgcAGGTA | 81 |
| | | | TCPTESPEACGS | | GCtgtACGGAAACCAGCCC | |
| | | | | | GAGCACCtgcCCGACCGAG | |
| | | | | | TCCCCGGAAGCGtgtGGCA | |
| | | | | | GC | |
| CCD6 | 3 | 3 | GSPGAGSCTETCSP | 31 | GGcTCTCCAggtgcAGGTA | 82 |
| | | | SCTP | | GCtgtACGGAAACCtgcAG | |
| | | | | | CCCGAGCtgtACCCCG | |
| CCD7 | 3 | 3 | GAPCGAGCAGPCGP | 32 | GGcgCTCCAtgTggtgcAG | 83 |
| | | | | | GTtgcGCaGGTCCAtgtGG | |
| | | | | | CCCG | |
| CCD8 | 3 | 1 | GSPGAGSCTCTCSP | 33 | GGcTCTCCAggtgcAGGTA | 84 |
| | | | | | GCtgtACGtgcACCtgtAG | |
| | | | | | CCCG | |
| CCD9 | 3 | 0 | GSPGAGSCCCTE | 34 | GGcTCTCCAggtgcAGGTA | 85 |
| | | | | | GCtgttgctgtACGGAA | |
| CCD10 | 3 | 7 | GSPCGAGESTTCSP | 35 | GGcTCTCCAtgTggtgcAG | 86 |
| | | | STPTSCPE | | GTGAGAGCACGACCtgcAG | |
| | | | | | CCCGAGCACCCCGACCTCC | |
| | | | | | tgtCCGGAA | |
| CCD11 | 3 | 3 | GSPCGAGCSTTCSP | 36 | GGcTCTCCAtgTggtgcAG | 87 |
| | | | | | GTtgcAGCACGACCtgtAG | |
| | | | | | CCCG | |
| CCD12 | 9 | 15 | GSPGAGSCAGSPTS | 37 | GGcTCTCCAggtgcAGGTA | 88 |
| | | | TEEGTSESACSPEG | | GCtgcGCTGGTAGCCCAAC | |
| | | | PGTSTEPSEGSCGP | | CTCTACCGAAGAAGGTACC | |
| | | | SPAGSPTSTEEGTC | | TCTGAATCCGCTtgTTCCC | |
| | | | TEPSEGSAPGTSEP | | CAGAAGGTCCTGGTACTAG | |
| | | | TCSGSAPGTSESAT | | CACTGAGCCAAGCGAAGGT | |
| | | | PESCGPSEPATSGS | | TCTtgTGGCCCATCCCCGG | |
| | | | ETPGSCAPTSGSET | | CAGGTAGCCCTACCTCTAC | |
| | | | PGSPAGSCTSTEEG | | CGAAGAGGGCACTtGCACC | |
| | | | TSESATPESCGPTE | | GAACCATCTGAGGGTTCCG | |
| | | | SASG | | CTCCTGGCACCTCCGAACC | |
| | | | | | GACTtgcTCCGGCAGTGCT | |
| | | | | | CCGGGTACTTCCGAAAGCG | |
| | | | | | CAACTCCGGAATCCtGCGG | |
| | | | | | TCCTTCTGAGCCTGCTACT | |
| | | | | | TCCGGCTCTGAAACTCCAG | |
| | | | | | GTAGCtgtGCGCCAACTTC | |
| | | | | | TGGTTCTGAAACTCCAGGT | |
| | | | | | TCACCGGCGGGTAGCtgcA | |
| | | | | | CGAGCACGGAGGAAGGTAC | |
| | | | | | CTCTGAGTCGGCCACTCCT | |
| | | | | | GAGTCCtGTGGCCCGACGG | |
| | | | | | AAagcgcctctGGC | |
| CCD13 | 9 | 10 | SGTASSSCPGSSTP | 38 | | |
| | | | SGATCGSPGTPGSG | | | |
| | | | TCASSSPGSSTPCS | | | |
| | | | GATGSPGSSCTPSG | | | |
| | | | ATGSPGCSSPSAST | | | |
| | | | GTGCPGSSPSASTG | | | |
| | | | CTGPGASPGTSCST | | | |
| | | | GSPGTP | | | |
| CCD14 | 9 | 15 | GSEPATSCGSETPG | 39 | | |
| | | | TSESATPESCGPGS | | | |
| | | | EPATSGSETPGCSP | | | |
| | | | AGSPTSTEEGTSTC | | | |
| | | | PSEGSAPGSEPATS | | | |
| | | | GCSETPGSEPATSG | | | |
| | | | SETCPGSEPATSGS | | | |
| | | | ETPGTCSTEPSEGS | | | |
| | | | APGTSESCATPESG | | | |
| | | | PGSEPATSGCSETP | | | |
| | | | GTST | | | |
| CCD15 | 9 | 10 | GSEPATSCGSETPG | 40 | | |
| | | | TSESCATPESGPGS | | | |
| | | | PCATSGSETPGSCP | | | |
| | | | AGSPTSTGTCSTEP | | | |
| | | | SEGSAPCGSEPATS | | | |
| | | | GSTCPGSEPATSGS | | | |
| | | | CTPGSEPATSGCSE | | | |
| | | | TPGTST | | | |
| CCD16 | 9 | 7 | GSPGAGSCTETSPS | 41 | GGcTCTCCAggtgcAGGTA | 89 |
| | | | TCPTESPEACGSGS | | GCtgtACGGAAACCAGCCC | |
| | | | GSPCSPSGTEACST | | GAGCACCtgcCCGACCGAG | |
| | | | SGSEGCSPSSTAPC | | TCCCCGGAAGCGtgtGGCA | |
| | | | GPTETEGCTTSSGP | | GCGGTAGCGGCAGCCCGtg | |
| | | | PCPESATSEG | | cAGCCCGAGCGGTACCGAG | |
| | | | | | GCGtgtAGCACGTCCGGCT | |
| | | | | | CGGAAGGTtgcTCTCCGTC | |
| | | | | | CTCCACGGCACCGtgtGGC | |
| | | | | | CCGACCGAAACCGAGGGCt | |
| | | | | | gcACGACCAGCAGCGGTCC | |
| | | | | | GCCGtgtCCGGAGAGCGCT | |
| | | | | | ACCTCCGAGGGT | |
| CCD17 | 3 | 15 | GSPGAGSCAGSPTS | 42 | GGcTCTCCAggtgcAGGTA | 90 |
| | | | TEEGTSESACSPEG | | GCtgcGCTGGTAGCCCAAC | |
| | | | PGTSTEPSEGSCGG | | CTCTACCGAAGAAGGTACC | |
| | | | | | TCTGAATCCGCTtgTTCCC | |
| | | | | | CAGAAGGTCCTGGTACTAG | |
| | | | | | CACTGAGCCAAGCGAAGGT | |
| | | | | | TCTtgTGGCggt | |
| CCD18 | 3 | 15 | GSPGAGSCAGSPTS | 43 | GGcTCTCCAggtgcAGGTA | 91 |
| | | | TEEGTSESACSPEG | | GCtgcGCTGGTAGCCCAAC | |
| | | | PGTSTEPSEGSCGG | | CTCTACCGAAGAAGGTACC | |
| | | | | | TCTGAATCCGCTtgTTCCC | |
| | | | | | CAGAAGGTCCTGGTACTAG | |
| | | | | | CACTGAGCCAAGCGAAGGT | |
| | | | | | TCTtgTGGCggt | |
| CCD19 | 3 | 15 | GSPGAGSCAGSPTS | 44 | GGcTCTCCAggtgcAGGTA | 92 |
| | | | TEEGTSESACSPEG | | GCtgcGCTGGTAGCCCAAC | |
| | | | PGTSTEPSEGSCGG | | CTCTACCGAAGAAGGTACC | |
| | | | | | TCTGAATCCGCTtgTTCCC | |
| | | | | | CAGAAGGTCCTGGTACTAG | |
| | | | | | CACTGAGCCAAGCGAAGGT | |
| | | | | | TCTtgTGGCggt | |
| CCD20 | 3 | 15 | GSPGAGSCAGSPTS | 45 | GGcTCTCCAggtgcAGGTA | 93 |
| | | | TEEGTSESACSPEG | | GCtgcGCTGGTAGCCCAAC | |
| | | | PGTSTEPSEGSCGG | | CTCTACCGAAGAAGGTACC | |
| | | | | | TCTGAATCCGCTtgTTCCC | |
| | | | | | CAGAAGGTCCTGGTACTAG | |
| | | | | | CACTGAGCCAAGCGAAGGT | |
| | | | | | TCTtgTGGCggt | |
| CCD21 | 3 | 3 | GAPCGAGCAGPCGP | 46 | GGcgCTCCAtgTggtgcAG | 94 |
| | | | | | GTtgcGCaGGTCCAtgtGG | |
| | | | | | CCCG | |
| CCD22 | 3 | 15 | GSPGAGSCAGSPTS | 47 | | |
| | | | TEEGTSESACSPEG | | | |
| | | | PGTSTEPSEGSCGG | | | |
| CCD23 | 3 | 15 | GSPGAGSCAGSPTS | 48 | GGcTCTCCAggtgcAGGTA | 95 |
| | | | TEEGTSESACSPEG | | GCtgcGCTGGTAGCCCAAC | |
| | | | PGTSTEPSEGSCGG | | CTCTACCGAAGAAGGTACC | |
| | | | | | TCTGAATCCGCTtgTTCCC | |
| | | | | | CAGAAGGTCCTGGTACTAG | |
| | | | | | CACTGAGCCAAGCGAAGGT | |
| | | | | | TCTtgTGGCggt | |
| CCD24 | 3 | 15 | GSPGAGSCAGSPTS | 49 | GGcTCTCCAggtgcAGGTA | 96 |
| | | | TEEGTSESACSPEG | | GCtgcGCTGGTAGCCCAAC | |
| | | | PGTSTEPSEGSCGG | | CTCTACCGAAGAAGGTACC | |
| | | | | | TCTGAATCCGCTtgTTCCC | |
| | | | | | CAGAAGGTCCTGGTACTAG | |
| | | | | | CACTGAGCCAAGCGAAGGT | |
| | | | | | TCTtgTGGCggt | |
| CCD25 | 3 | 15 | GSPGAGSCAGSPTS | 50 | | |
| | | | TEEGTSESACSPEG | | | |
| | | | PGTSTEPSEGSCGG | | | |
| CCD26 | 3 | 15 | GSPGAGSCAGSPTS | 51 | | |
| | | | TEEGTSESACSPEG | | | |
| | | | PGTSTEPSEGSCGG | | | |
| CCD27 | 3 | 15 | GAPGSPACGSPTST | 52 | | |
| | | | EEGTSESATCPESG | | | |
| | | | PGSEPATSGSTCPA | | | |
| CCD28 | 3 | 15 | TEPSEGSCAPGSPA | 53 | | |
| | | | GSPTSTEEGCTSES | | | |
| | | | ATPESGPGSEPCAT | | | |
| CCD29 | 3 | 15 | PAGSPTSCTEEGTS | 54 | | |
| | | | TEPSEGSAPCGTSE | | | |
| | | | SATPESGPGSPCAT | | | |
| CCD30 | 3 | 15 | SEPATSGCSETPGT | 55 | | |
| | | | SESATPESGCPGTS | | | |
| | | | TEPSEGSAPGSCPA | | | |
| CCD31 | 3 | 15 | GAPSPSACSTGTGP | 56 | | |
| | | | GTPGSGTASCSSPG | | | |
| | | | SSTPSGATGSPCGP | | | |
| CCD32 | 3 | 15 | GPGTPGSCGTASSS | 57 | | |
| | | | PGSSTPSGACTGSP | | | |
| | | | GSSPSASTGTGCPG | | | |
| CCD33 | 3 | 15 | SPSASTGCTGPGAS | 58 | | |
| | | | PGTSSTGSPCGTPG | | | |
| | | | SGTASSSPGSSCTP | | | |
| CCD34 | 3 | 15 | SASTGTGCPGASPG | 59 | | |
| | | | TSSTGSPGTCPGSG | | | |
| | | | TASSSPGSSTPCSG | | | |
| CCD35 | 3 | 15 | GTSTPESCGSASPG | 60 | | |
| | | | TSPSGESSTCAPGT | | | |
| | | | SPSGESSTAPGCST | | | |
| CCD36 | 3 | 15 | AESPGPGCSTSESP | 61 | | |
| | | | SGTAPGSTSCSTAE | | | |
| | | | SPGPGTSPSGSCST | | | |
| CCD37 | 3 | 15 | GSTSSTACSPGPGS | 62 | | |
| | | | TSSTAESPGCPGST | | | |
| | | | SESPSGTAPGSCTS | | | |
| CCD38 | 3 | 15 | ESSTAPGCSTSESP | 63 | | |
| | | | SGTAPGSTSCSPSG | | | |
| | | | TAPGTSPSGESCST | | | |
| CCD39 | 3 | 3 | GSPCATSCGSTCPG | 64 | | |
| CCD40 | 3 | 3 | GTSCSATCPESCGP | 65 | | |
| CCD41 | 3 | 3 | GTSCTEPCSEGCSA | 66 | | |
| CCD42 | 3 | 3 | GSTCSESCPSGCTA | 67 | | |
| CCD43 | 3 | 3 | GTSCTPSCGSACSP | 68 | | |
| CCD44 | 3 | 3 | GTSCPSGCSSTCAP | 69 | | |
| CCD45 | 3 | 3 | GSTCSSTCAESCPG | 70 | | |
| CCD46 | 3 | 3 | GTPCGSGCTASCSS | 71 | | |
| CCD47 | 3 | 3 | GSSCTPSCGATCGS | 72 | | |
| CCD48 | 3 | 3 | GSSCPSACSTGCTG | 73 | | |
| CCD49 | 3 | 3 | GASCPGTCSSTCGS | 74 | | |
| CCD50 | 1 | NA | GSPGAGSCAG | 75 | | |
| CCD51 | 1 | NA | GAPCGA | 76 | | |

[0226] 3. Peptidic Cleavage Moieties

[0227] In one aspect, the invention provides targeted conjugate compositions comprising one or more peptidic cleavage moieties (PCM) that are a substrate for a protease associated with a target tissue in a subject; non-limiting examples of which are a cancer, tumor, or tissues or organs involved in an inflammatory response. It is an object of the invention to provide peptidic cleavage moities (PCM) specifically configured for use in targeted conjugate compositions comprising payloads such that the payloads (with or without some portion of an XTEN sequence) of the compositions, or payloads linked to TM (with or without some portion of an XTEN sequence), are released from the composition when the composition comprising the PCM is in proximity with the targeted tissue-associated protease. The design of the targeted conjugate compositions is such that the resulting released component, comprising the TM and/or the payload have an enhanced ability to attach to or to penetrate into the target tissue; whether by the reduced molecular mass of the resulting fragment or by reduced steric hindrence by the flanking bulky XTEN that is cleaved away.

[0228] Stroma in human carcinomas consists of extracellular matrix and various types of non-carcinoma cells such as leukocytes, endothelial cells, fibroblasts, and myofibroblasts. The tumor-associated stroma actively supports tumor growth by stimulating neo-angiogenesis, as well as proliferation and invasion of apposed carcinoma cells. Stromal fibroblasts, often referred to as cancer-associated fibroblasts (CAF), have a particularly important role in tumor progression due to their ability to dynamically modify the composition of the extracellular matrix (ECM), thereby facilitating tumor cell invasion and subsequent metastatic colonization. In particular, it is known in the art that proteases are important components that contribute to malignant progression, including tumor angiogenesis, invasion, extracellular matrix remodeling, and metastasis, where proteases function as part of an extensive multidirectional network of proteolytic interactions.

[0229] As a requirement of malignant tumours is their ability to acquire a vasculature system in order to penetrate into surrounding normal tissues and disseminate to distant sites, the tumor relies heavily upon the increased expression of extracellular endoproteases from multiple enzymatic classes; e.g., the metalloproteases (MMP) and serine, threonine, cysteine and aspartic proteases. The role of proteases are not limited to tissue invasion and angiogenesis, however. These enzymes also have major roles in growth factor activation, cellular adhesion, cellular survival and immune surveillance. For example, MMPs are able to impact in vivo on tumour cell behaviour as a consequence of their ability to cleave growth factors, cell surface receptors, cell adhesion molecules, or chemokines. Collectively, the actions of tumor-associated proteases represent a significant force in the phenotypic evolution of cancer.

[0230] Considering the differential expression of many such proteolytic enzymes between normal and tumour tissue, this differential expression can be utilized as a means to semi-selectively activate or alter chemotherapeutic agents that are in proximity to or are colocalized with a tumor. As used herein, “colocalized” means that the protease is in highest concentration adjacent to or within a tumor and the concentration diminishes as the distance from the tumor increases. In this respect, the serine and metalloproteases are candidates for targeted, differential drug delivery due to both their elevated activity in the extracellular tumour environment and their ability to selectively and specifically cleave short peptide sequences. Specifically, the increased endoprotease activity within tumours relative to non-diseased tissue can be harnessed to activate prodrug compounds comprising specific peptide sequences and having potent anticancer therapeutics that are subsequently released, resulting in high levels of the active agent at the tumour and low or negative drug levels in normal healthy tissues. As a consequence of the selective delivery of such prodrug cancer therapeutics, there is both a concommitant reduction in the required activity of these agents and reduced toxicity against normal tissues, including liver, heart and bone marrow, thereby greatly improving the therapeutic index of such compounds.

[0231] In some embodiments, the invention comprises targeted conjugate compositions comprising PCM wherein when the composition is cleaved by the targeted tissue-associated protease, releasing a fragment comprising the payload, the fragment comprising the payload is capable of penetrating within said tissue to a concentration that is at least 2-fold, or at least 3-fold, or at least 4-fold, or at least 5-fold greater compared to the composition not comprising the PCM. In other embodiments, the invention comprises targeted conjugate compositions comprising PCM wherein when the composition is cleaved by the targeted tissue-associated protease, releasing a released targeted composition fragment comprising the payload and the TM, the released targeted composition is capable of penetrating within said tissue at a rate that is at least 2-fold, or at least 3-fold, or at least 4-fold, or at least 5-fold greater compared to a corresponding composition not comprising the PCM. In one embodiment of the foregoing, the released targeted composition fragment, after its release, has a resulting molecular weight that is at least 4-fold, at least 5-fold, at least 6-fold, at least 7-fold, at least 8-fold, at least 10-fold less than the intact targeted conjugate composition that is not cleaved by the protease. In another embodiment of the foregoing, the released targeted composition, after its release, has a resulting hydrodynamic radius that is at least 4-fold, at least 5-fold, at least 6-fold, at least 7-fold, at least 8-fold, at least 10-fold less than the intact targeted conjugate composition that is not cleaved by the protease. It is specifically contemplated that in the subject targeted conjugate compostion embodiments, the cleavage by the tissue-associated protease results in a fragment comprising the payload that is able to more effectively penetrate the tissue, such as a tumor, because of the reduced size of the fragment relative to the intact composition, resulting in a pharmacologic effect of the payload within said tissue or cell. It is also specifically contemplated that the PCM of the targeted conjugate compositions are designed for use in compositions intended to target specific tissues with a specific protease known to be produced by that target tissue or cell. In one embodiment, the PCM of the targeted conjugate composition comprises an an amino acid sequence that is a substrate for an extracellular protease secreted by the target tissue, including but not limited to the proteases of Table 7. In another embodiment, the PCM of the targeted conjugate composition comprises an an amino acid sequence that is a substrate for an extracellular protease secreted by the target tissue, including but not limited to the group of sequences set forth in Table 8. In another embodiment, the PCM comprises an amino acid sequence that is a substrate for a cellular protease located within a cell, including but not limited to the proteases of Table 7. In another embodiment, the PCM comprises an amino acid sequence sequence that is a substrate for a protease associated with a tissue that is a cancer. In another embodiment, the PCM comprises an amino acid sequence sequence that is a substrate for a protease associated with a cancerous tumor. In another embodiment, the PCM comprises an amino acid sequence sequence that is a substrate for a protease associated with a cancer such as a leukemia. In another embodiment, the PCM comprises an amino acid sequence sequence that is a substrate for a protease associated with an inflammatory tissue.

[0232] In one embodiment, the PCM of the targeted conjugate composition is a substrate for at least one protease selected from the group consisting of the group of proteases set forth in Table 7. In some embodiments, the PCM is a substrate for at least one protease selected from the group consisting of metalloproteinases, cysteine proteases, aspartate proteases, and serine proteases. In another embodiment, the PCM is a substrate for one or more proteases selected from the group consisting of meprin, neprilysin (CD10), PSMA, BMP-1, A disintegrin and metalloproteinases (ADAMs), ADAMS, ADAMS, ADAM10, ADAM12, ADAM15, ADAM17 (TACE), ADAM19, ADAM28 (MDC-L), ADAM with thrombospondin motifs (ADAMTS), ADAMTS1, ADAMTS4, ADAMTS5, MMP-1 (Collagenase 1), MMP-2 (Gelatinase A), MMP-3 (Stromelysin 1), MMP-7 (Matrilysin 1), MMP-8 (Collagenase 2), MMP-9 (Gelatinase B), MMP-10 (Stromelysin 2), MMP-11(Stromelysin 3), MMP-12 (Macrophage elastase), MMP-13 (Collagenase 3), MMP-14 (MT1-MMP), MMP-15 (MT2-MMP), MMP-19, MMP-23 (CA-MMP), MMP-24 (MT5-MMP), MMP-26 (Matrilysin 2), MMP-27 (CMMP), Legumain, Cathepsin B, Cathepsin C, Cathepsin K, Cathepsin L, Cathepsin S, Cathespin X, Cathepsin D, Cathepsin E, Secretase, urokinase (uPA), Tissue-type plasminogen activator (tPA), plasmin, thrombin, prostate-specific antigen (PSA, KLK3), human neutrophil elastase (HNE), Elastase, Tryptase, Type II transmembrane serine proteases (TTSPs), DESC1, Hepsin (HPN), Matriptase, Matriptase-2, TMPRSS2, TMPRSS3, TMPRSS4 (CAP2), Fibroblast Activation Protein (FAP), kallikrein-related peptidase (KLK family), KLK4, KLK5, KLK6, KLK7, KLK8, KLK10, KLK11, KLK13, and KLK14. In some embodiments, the PCM is a substrate for an ADAM17. In some embodiments, the PCM is a substrate for a BMP-1. In some embodiments, the PCM is a substrate for a cathepsin. In some embodiments, the PCM is a substrate for a cysteine protease. In some embodiments, the PCM is a substrate for a HtrAl. In some embodiments, the PCM is a substrate for a legumain. In some embodiments, the PCM is a substrate for a MT-SP1. In some embodiments, the PCM is a substrate for a metalloproteinase. In some embodiments, the PCM is a substrate for a neutrophil elastase. In some embodiments, the PCM is a substrate for a thrombin. In some embodiments, the PCM is a substrate for a Type II transmembrane serine protease (TTSP). In some embodiments, the PCM is a substrate for TMPRSS3. In some embodiments, the PCM is a substrate for TMPRSS4. In some embodiments, the PCM is a substrate for uPA. In one embodiment, the PCM comprises a cleavage sequence selected from the group of sequences set forth in Table 8. In another embodiment, the PCM of the cleavage conjugate compostion comprises a first cleavage sequence and a second cleavage sequence different from said first cleavage sequence wherein each sequence is selected from the group of sequences set forth in Table 8 and the first and the second cleavage sequences are linked to each other by 1 to 6 amino acids selected from glycine, serine, alanine, and threonine. In another embodiment, the PCM of the cleavage conjugate compostion comprises a first cleavage sequence, a second cleavage sequence different from said first cleavage sequence, and a third cleavage sequence wherein each sequence is selected from the group of sequences set forth in Table 8 and the first and the second and the third cleavage sequences are linked to each other by 4 to 6 amino acids selected from glycine, serine, alanine, and threonine. In other embodiments, the invention provides targeted conjugate compositions comprising one, two, or three PCM. It is specifically intended that the multiple PCM of the targeted conjugate compositions can be concatenated to form a universal sequence that can be cleaved by multiple proteases. It is contemplated that such compositions would be more readily cleaved by diseased target tissues that express multiple proteases, with the result that the resulting fragments bearing the TM and/or the payload drug(s) would more readily penetrate the target tissue and exert the pharmacologic effect of the payload drug(s).

TABLE 7
Proteases of Target Tissues.

| Class of Proteases | Protease |
|---|---|
| Metalloproteinases | Meprin |
| | Neprilysin (CD10) |
| | PSMA |
| | BMP-1 |
| | A disintegrin and metalloproteinases (ADAMs) |
| | ADAM8 |
| | ADAM9 |
| | ADAM10 |
| | ADAM12 |
| | ADAM15 |
| | ADAM17 (TACE) |
| | ADAM19 |
| | ADAM28 (MDC-L) |
| | ADAM with thrombospondin motifs (ADAMTS) |
| | ADAMTS1 |
| | ADAMTS4 |
| | ADAMTS5 |
| | Matrix Metalloproteinases (MMPs) |
| | MMP-1 (Collagenase 1) |
| | MMP-2 (Gelatinase A) |
| | MMP-3 (Stromelysin 1) |
| | MMP-7 (Matrilysin 1) |
| | MMP-8 (Collagenase 2) |
| | MMP-9 (Gelatinase B) |
| | MMP-10 (Stromelysin 2) |
| | MMP-11(Stromelysin 3) |
| | MMP-12 (Macrophage elastase) |
| | MMP-13 (Collagenase 3) |
| | MMP-14 (MT1-MMP) |
| | MMP-15 (MT2-MMP) |
| | MMP-19 |
| | MMP-23 (CA-MMP) |
| | MMP-24 (MT5-MMP) |
| | MMP-26 (Matrilysin 2) |
| | MMP-27 (CMMP) |
| Cysteine Proteases | Legumain |
| | Cysteine Cathepsins |
| | Cathepsin B |
| | Cathepsin C |
| | Cathepsin K |
| | Cathepsin L |
| | Cathepsin S |
| | Cathespin X |
| Aspartate Proteases | Cathepsin D |
| | Cathepsin E |
| | Secretase |
| Serine Proteases | Urokinase (uPA) |
| | Tissue-type plasminogen activator (tPA) |
| | Plasmin |
| | Thrombin |
| | Prostate-specific antigen (PSA, KLK3) |
| | Human neutrophil elastase (HNE) |
| | Elastase |
| | Tryptase |
| | Type II transmembrane serine proteases (TTSPs) |
| | DESC1 |
| | Hepsin (HPN) |
| | Matriptase |
| | Matriptase-2 |
| | TMPRSS2 |
| | TMPRSS3 |
| | TMPRSS4 (CAP2) |
| | Fibroblast Activation Protein (FAP) |
| | kallikrein-related peptidase (KLK family) |
| | KLK4 |
| | KLK5 |
| | KLK6 |
| | KLK7 |
| | KLK8 |
| | KLK10 |
| | KLK11 |
| | KLK13 |
| | KLK14 |

[0233] In certain embodiments, the invention provides PCM compositions intended for use in the subject targeted conjugate compositions comprising at least a first cleavage sequence selected from the group of sequences set forth in Table 8. In some embodiments, the PCM composition sequences are designed with certain properties in mind, including that 1) the nucleic acid encoding the sequences can be readily linked to or within a nucleic acid sequence encoding an XTEN or targeting moiety, resulting in a sequence that can be expressed and recovered as a fusion protein; and 2) the resulting fusion protein can serve as a substrate for a target tissue protease described herein. In one embodiment, the PCM exhibits at least about 90% identity, or at least about 93% identity, or at least about 94% identity, or at least about 95% identity, or at least about 96% identity, or at least about 97% identity, or at least about 98% identity, or at least about 99% identity, or is identical to a peptidyl cleavage sequence selected from the group consisting of the sequences set forth in Table 8.

TABLE 8
Sequences of Peptidyl Cleavage Moieties (PCM)

| PCM | Protease Acting | Exemplary | SEQ ID | Cleavage | SEQ ID |
|---|---|---|---|---|---|
| Designation | Upon Sequence | Cleavage Sequence | NO: | Sequences* | NO: |
| BSRS1 | MMP-2, 7, 9, 14, | LSGR↓SDN↓HSPLG↓LAGS | 97 | | |
| | matriptase, uPA, | | | | |
| | legumain | | | | |
| BSRS2 | MMP-2, 7, 9, 14, | SPLG↓LAGSLSGR↓SDN↓H | 98 | | |
| | matriptase, uPA, | | | | |
| | legumain | | | | |
| BSRS3 | MMP-2, 7, 9, 14, | SPLG↓LSGR↓SDN↓H | 99 | | |
| | matriptase, uPA, | | | | |
| | legumain | | | | |
| BSRS4 | MMP-2, 7, 9, 14, | LAGR↓SDN↓HSPLG↓LAGS | 100 | | |
| | matriptase, uPA, | | | | |
| | legumain | | | | |
| BSRS5 | MMP-2, 7, 9, 14, | LAGR↓SDN↓HVPLS↓LSMG | 101 | | |
| | matriptase, uPA, | | | | |
| | legumain | | | | |
| BSRS6 | MMP-2, 7, 9, 14, | LAGR↓SDN↓HEPLE↓LVAG | 102 | | |
| | matriptase, uPA, | | | | |
| | legumain | | | | |
| RS1 | MMP-2, 7, 9, 14 | SPLG↓LAGS | 103 | | |
| RS2 | MMP-2, 7, 9, 14, | GPLG↓LAR↓G | 104 | | |
| | matriptase, uPA, | | | | |
| | legumain | | | | |
| RS3 | Matriptase, uPA, | LSGR↓SDN↓H | 105 | | |
| | legumain | | | | |
| RS4 | MMP-2, 14 | GTAH↓LMGG | 106 | | |
| RS5 | MMP-14 | RIGS↓LRTA | 107 | | |
| RS6 | MMP-14 | RIGA↓LRTA | 108 | | |
| RS7 | MMP-14 | RIGW↓LRTA | 109 | | |
| RS8 | MMP-14 | RIGN↓LRTA | 110 | | |
| RS9 | MMP-14 | RIGF↓LRTA | 111 | | |
| RS10 | MMP-14 | RIFF↓LRTA | 112 | | |
| RS11 | MMP-14 | RILF↓LRTA | 113 | | |
| RS12 | MMP-14 | RIYF↓LRTA | 114 | | |
| RS13 | MMP-14 | RIQF↓LRTA | 115 | | |
| RS14 | MMP-14 | EPAA↓LMAG | 116 | | |
| RS15 | MMP-14 | EPAN↓LMAG | 117 | | |
| RS16 | MMP-14 | EPAS↓LMAG | 118 | | |
| RS17 | MMP-14 | EPFH↓LMAG | 119 | | |
| RS18 | MMP-14 | EPWH↓LMAG | 120 | | |
| RS19 | MMP-14 | EPRH↓LMAG | 121 | | |
| RS20 | MMP-7 | VPLS↓LFMG | 122 | | |
| RS21 | MMP-7 | VPLS↓LHMG | 123 | | |
| RS22 | MMP-7 | VPLS↓LQAG | 124 | | |
| RS23 | MMP-2, 7, 9, 14 | VPLS↓LTMG | 125 | | |
| RS24 | MMP-2, 7, 9, 14, | VPLS↓LKMG | 126 | | |
| | matriptase | | | | |
| RS25 | MMP-2, 7, 9, 14 | VPLS↓LSMG | 127 | | |
| RS26 | MMP-7 | VPLS↓LNAG | 128 | | |
| RS27 | MMP-7 | VPLS↓LLMG | 129 | | |
| RS28 | MMP-7 | EPLE↓LPAG | 130 | | |
| RS29 | MMP-2,7, 9, 14 | EPLE↓LAAG | 131 | | |
| RS30 | MMP-2, 7, 9 | EPLE↓LVAG | 132 | | |
| RS31 | MMP-7 | EPLE↓LSAG | 133 | | |
| RS32 | MMP-7 | EPLE↓LDAG | 134 | | |
| RS33 | MMP-7 | EPLE↓LQAG | 135 | | |
| RS34 | MMP-2, 7, 9, 14, | EPLE↓LRAG | 136 | | |
| | matriptase | | | | |
| RS35 | MMP-7 | EPLE↓LKAG | 137 | | |
| RS36 | MMP-2, 7, 9, 14 | EPLE↓LIAG | 138 | | |
| RS37 | Elastase-2 | LGPV↓SGVP | 139 | —/—/—/VIAT/—/—/—/— | |
| RS38 | Granzyme-B | VAGD↓SLEE | 140 | V/—/—/D/—/—/—/— | |
| RS39 | MMP-12 | GPAG↓LGGA | 141 | G/PA/—/G/L/—/G/— | 212 |
| RS40 | MMP-13 | GPAG↓LRGA | 142 | G/P/—/G/L/—/GA/— | 213 |
| RS41 | MMP-17 | APLG↓LRLR | 143 | —/PS/—/—/LQ/—/LT/— | |
| RS42 | MMP-20 | PALP↓LVAQ | 144 | | |
| RS43 | TEV | ENLYFQ↓G | 145 | ENLYFQ/G/S | 214 |
| RS44 | Enterokinase | DDDK↓IVGG | 146 | DDDK/IVGG | 215 |
| RS45 | Protease 3C | LEVLFQ↓GP | 147 | LEVLFQ/GP | 216 |
| | (PreScission ™) | | | | |
| RS46 | Sortase A | LPKT↓GSES | 148 | L/P/KEAD/T/G/—/EKS/S | 217 |
| RS47 | Trypsin | K↓X** or R↓X | | K/X or R/X | |
| RS48 | Trypsin | R↓X** | | SASRSA | 218 |
| RS49 | uPA | SGR↓SA | 149 | S/G/R/SRKA/AGSVR | 219 |
| RS50 | tPA | YGR↓ SA | 150 | RYFLI/GA/R/RVAS/AG | |
| RS51 | PSA | SSYY↓ SG | 151 | S/S/FY/Y/S/G | 220 |
| RS52 | DESC1 | RRAR↓VVGG | 152 | R/RAL/ALY/R/AV/V/G/G | 221 |
| RS53 | Hepsin | RQLR↓VVGG | 153 | R/RQ/YL/R/V/V/G/G | 222 |
| RS54 | Matriptase-2 | RRAR↓VVGG | 154 | R/R/A/R/AV/V/G/G | 223 |
| RS55 | MT-SP1/Matriptase | RQAR↓VVGG | 155 | R/QR/A/R/AVY/V/G/G | 224 |
| RS56 | PSMA | N↓ γ N | | N γ N | |
| RS57 | Cathepsin C | GF↓FY | 156 | GP/FWR/**/— | |
| RS58 | Cathepsin D | F↓IK | | FL/IV/KE | |
| RS59 | Cathepsin E | F↓IK | | FL/IV/KE | |
| RS60 | Cathepsin F | WLR↓ | | WYRNle/L/RKQ | |
| RS61 | Cathepsin K | KPR↓ | | KMGH/ILPNle/RKQ | |
| RS62 | Cathepsin L | KFR↓ | | RKLnL/FYW/RKQ | |
| RS63 | Cathepsin S | RVK↓ | | RPI/VLMnL/RKQ | |
| RS64 | Cathepsin V/L2 | PWR↓ | | PNleR/WYF/RKQ | |
| RS65 | MMP | PLG↓HofOrnL | 157 | | |
| RS66 | MMP | EPCitF↓HofYL | 158 | | |
| RS67 | MMP-2 | PQG↓IAGQ | 159 | | |
| RS68 | MMP-2 | PQG↓IMelG | 160 | | |
| RS69 | MMP-9 | AALG↓NvaP | 161 | | |
| RS70 | MMP-9 | GPQG↓IAGQR | 162 | | |
| RS71 | MMP-9 | SGKIPRT↓ATA | 163 | P/R/PSTRA/Hy/ST | |
| RS72 | MMP-9 | SGPLF↓YSVTA | 164 | | |
| RS73 | MMP-9 | PLR↓LSW | 165 | | |
| RS74 | MMP-9 | GKGPRQ↓ITA | 166 | | |
| RS75 | MMP-9 | SGRR↓LIHHT | 167 | S/G/R/R/L/IL | 225 |
| RS76 | MMP-9 | SGQPHY↓LTTA | 168 | | |
| RS77 | MMP-9 | SG↓LKALM | 169 | | |
| RS78 | MMP-9 | SGFGSRY↓LTA | 170 | | |
| RS79 | MMP-9 | SGLRPAK↓STA | 171 | | |
| RS80 | MMP-9 | LGP↓STST | 172 | | |
| RS81 | MMP-9 | PQG↓VR | 173 | | |
| RS82 | MMP-9 | PSG↓LP | 174 | P/S/G/L/HyP | 226 |
| RS83 | MMP-9 | PAG↓VQ | 175 | | |
| RS84 | MMP-9 | PSG↓RD | 176 | | |
| RS85 | MMP-9 | PPG↓IV | 177 | P/PG/G/Hy/HyR | |
| RS86 | MMP-9 | PEN↓FF | 178 | | |
| RS87 | MMP-9 | PLK↓LM | 179 | | |
| RS88 | MMP-9 | PGA↓YH | 180 | | |
| RS89 | MMP-9 | AIH↓IQ | 181 | | |
| RS90 | MMP-9 | HFF↓KN | 182 | | |
| RS91 | MMP-9 | GLS↓LS | 183 | | |
| RS92 | MMP-9 | ASD↓YK | 184 | | |
| RS93 | MMP-2, MMP-9 | GPLG↓MLSQ | 185 | P/Hy/G/Hy/HyWR | |
| RS94 | MMP-2, MMP-9 | CG↓LDD | 186 | | |
| RS95 | MMP-2, MMP-9, | GPQG↓IWGQ | 187 | | |
| | MT1-MMP | | | | |
| RS96 | MMP-7 | RPLA↓LWRS | 188 | | |
| RS97 | MMP-7 | GPLG↓LARK | 189 | | |
| RS98 | Hk2 | GKAFR↓RL | 190 | | |
| RS99 | MMP-9, uPA | RPSA↓SRSA | 191 | | |
| RS100 | MMP-2 | PLGLDpaAR | 192 | | |
| RS101 | MMP-9 | | | P/LMVQChaHofNva/ | |
| | | | | G/LIYSFC/ST | |
| RS102 | MMP-9 | PChaG↓SmcHA | 193 | P/LCha/G/LSmc/HW/A | |
| RS103 | MMP-13, MMP-8 | PChaGNvaHAdF | 194 | | |
| RS104 | ADAM10 | PTASA↓LKG | 195 | P/T/A/AS/A/LFYQ/KRTI/ | 227 |
| | | | | GAS | |
| RS105 | ADAM17 | PRPAA↓VKGT | 196 | P/HR/P/AS/A/VIL/KRTVI/ | |
| | | | | GST/TP | |
| RS106 | Cathepsin B | V↓Cit | | | |
| RS107 | Cathepsin B | F↓K | | | |
| RS108 | Elastase | AA↓PV | 197 | | |
| RS109 | Cathepsin D | GPIC↓FRLG | 198 | | |
| RS110 | Plasmin | A↓FK | | | |
| RS111 | Legumain | AAN↓L | 199 | | |
| RS112 | Legumain | PTN↓ | | PTAWS/TPASI/N | |
| RS113 | Meprin | | | ED/GTAV/— | |
| RS114 | Meprin A | F↓SPFR | 200 | SFAMTY/ | |
| | | | | SFAMTY/P/PVIGA/— | |
| RS115 | Meprin B | E↓EEAY | 201 | DE/DE/YEFDG/ PVIGA/— | |
| RS116 | Neprilysin | _{β}-AIA↓L | 202 | _{β}-A/LI/A/L | |
| RS117 | ADAMTS4 | E↓VQRKTGT | 203 | E/AFVLMY/(−)/RK/—— (−)/ST | |
| RS118 | ADAMTS4 | DVQE↓FRGVTAVIR | 204 | | |
| RS119 | ADAMTS4 | HNE↓FRQRETYMVF | 205 | | |
| RS120 | ADAMTS5 | KEEE↓GLGS | 206 | | |
| RS121 | ADAMTS5 | GELE↓GRGT | 207 | | |
| RS122 | ADAMTS5 | NITEGE↓ARGS | 208 | | |
| RS123 | ADAMTS5 | TAQE↓AGEG | 209 | | |
| RS124 | ADAMTS5 | VSQE↓LGQR | 210 | | |
| RS125 | ADAMTS5 | PTAQE↓AGE | 211 | | |

↓indicates cleavage site
Special amino acid abbreviation:
Cit: Citrilline;
Cha: β-cyclohexylalanine;
Hof: homophenylalanine;
Nva: aminosuberic acid;
Dpa: D-phenylalanine;
Nle: Norleucine;
Smc: S-methylcysteine
*the listing of multiple amino acids before, between, or after a slash indicate alternative amino acids that can be substituted at the position;
“—” indicates that any amino acid may be substituted for the corresponding amino acid indicated in the middle column
**x is any L-amino acid other than proline
Hy is any hydrophobic L-amino acid
γ indicates that bond is a gamma carboxy linkage

### III). XTEN of the Targeted Conjugate Compositions

[0234] The present invention relates, in part, to extended recombinant polypeptides (XTEN) sequences engineered for use in targeted conjugate compositions. Such compositions are useful as fusion partners for the creation of fusion proteins as well as reagent conjugation partners to create targeted conjugate compositions. Additionally, it is an object of the present invention to provide methods to create the compositions.

[0235] By way of illustrative example, the XTENs capable of linking or fusing to one or more fusion partners partners for the creation of the subject compositions, which include other XTEN, PCM, targeting moieties or CCD to be conjugated to small molecule payloads, resulting in the targetedconjugate compositions, are specifically engineered to confer certain properties on the resulting compositions, including enhanced solubility, enhanced pharmacokinetic properties, increased mass and hydrodynamic radius to reduce extravasation, as well as a shielding effect to reduce undesireable interaction with otherwise healthy tissues and resultant side effects or toxicity. In some cases, XTEN are designed to incorporate defined numbers of reactive amino acids for linking to the targeting moieties or to permit the creation of multivalent constructs where an XTEN serves as either the backbone to which multiple fusion proteins are attached or to permit conjugation to trivalent or quadravalent linkers via cross-linkers or azide/alkyne reactants. The present invention also provides methods to create such engineered XTEN polymers for use in creating the subject compositions.

[0236] In another aspect, the invention provides XTEN polymers comprising defined numbers of cross-linkers or azide/alkyne reactants useful as reactant conjugation partners in the creation of monomeric and multimeric configurations, as well as methods of the preparation of such reactants. The XTEN comprising cross-linkers or azide/alkyne reactants are used as reactants in the conjugation of targeting moieties, other XTEN or other fusion proteins to result in specifically designed conjugate compositions used to achieve the desired physical, pharmaceutical, targeting, and pharmacological properties, including differential toxicity to target tissues.

[0237] In another aspect, the invention provides compositions of XTEN including combinations of different fusion proteins or targeting moieties, in defined numbers in either monomeric or multimeric configurations to provide compositions with enhanced targeting, pharmaceutical, pharmacokinetic, and pharmacologic properties, including differential toxicity to diseased target tissues compared to healthy tissues. Such compositions linked to such payloads may have utility, when adminisered to a subject, in the prevention, treatment or amelioration of diseases, with a beneficial response due to the pharmacologic or biologic effect of the payload.

[0238] 4. XTEN: Extended Recombinant Polypeptides

[0239] In one aspect, the invention provides XTEN polypeptide compositions that are useful as fusion partners or as conjugation partners to link to one or more targeting moieties, peptidyl cleavage moieties, CCD, or fusion proteins having the foregoing components, either by recombinant fusion or via a cross-linker reactant that, when combined with the drug or biologic payloads linked to the CCD, result in the targeted conjugate compositions.

[0240] In some embodiments, XTEN are polypeptides with non-naturally occurring, substantially non-repetitive sequences having a low degree or no secondary or tertiary structure under physiologic conditions. XTEN typically have from about 36 to about 1000 or more amino acids, of which the majority or the entirety are small hydrophilic amino acids. As used herein, “XTEN” specifically excludes whole antibodies or antibody fragments (e.g. single-chain antibodies and Fc fragments). XTEN polypeptides have utility as fusion and as conjugation partners in that they serve in various roles, conferring certain desirable properties when joined, linked, or fused to a targeting moiety, another XTEN, or other fusion partners. The resulting compositions have enhanced properties, such as enhanced pharmacokinetic, physicochemical, pharmacologic, and improved toxicologic and pharmaceutical properties compared to the corresponding payloads or targeting moieties not linked to XTEN, making them useful in the treatment of certain conditions for which the payloads or targeting moieties are known in the art to be used.

[0241] The unstructured characteristic and physicochemical properties of the XTEN result, in part, from the overall amino acid composition that is typically disproportionately limited to 4-6 types of hydrophilic amino acids, the linking of the amino acids in a quantifiable, substantially non-repetitive design, and from the resulting length and/or configuration of the XTEN polypeptide. In an advantageous feature common to XTEN but uncommon to native polypeptides, the properties of XTEN disclosed herein are not tied to absolute primary amino acid sequences, as evidenced by the diversity of the exemplary sequences of Tables 10 and 11 that, within varying ranges of length, possess similar properties and confer enhanced properties on the payloads or targeting moieties to which they are linked, many of which are documented in the Examples. Indeed, it is specifically contemplated that the compositions of the invention not be limited to those XTEN specifically enumerated in Tables 10 and 11, but, rather, the embodiments include sequences having at least 90%, 91%, 92%, 93%, 94%, 95%, 96%, 97%, 98%, or 99% sequence identity to the sequences of Tables 10 and 11 as they exhibit the properties of XTEN described below. It has been established that such XTEN have properties more like non-proteinaceous, hydrophilic polymers (such as polyethylene glycol, or “PEG”) than they do proteins. In some embodiments, the XTEN of the present invention exhibit one or more of the following advantageous properties: defined and uniform length (for a given sequence), conformational flexibility, reduced or lack of secondary structure, high degree of random coil formation, high degree of aqueous solubility, high degree of protease resistance, low immunogenicity, low binding to mammalian receptors, a defined degree of charge, and increased hydrodynamic (or Stokes) radii; properties that are similar to certain hydrophilic polymers (e.g., polyethylene glycol) that make them particularly useful as conjugation partners.

[0242] The XTEN component(s) of the subject fusion proteins and conjugates are designed to behave like denatured peptide sequences under physiological conditions, despite the extended length of the polymer. “Denatured” describes the state of a peptide in solution that is characterized by a large conformational freedom of the peptide backbone. Most peptides and proteins adopt a denatured conformation in the presence of high concentrations of denaturants or at elevated temperature. Peptides in denatured conformation have, for example, characteristic circular dichroism (CD) spectra and are characterized by a lack of long-range interactions as determined by NMR. “Denatured conformation” and “unstructured conformation” are used synonymously herein. In some embodiments, the invention provides XTEN sequences that, under physiologic conditions, resemble denatured sequences that are largely devoid of secondary structure. In other cases, the XTEN sequences are substantially devoid of secondary structure under physiologic conditions. “Largely devoid,” as used in this context, means that less than 50% of the XTEN amino acid residues of the XTEN sequence contribute to secondary structure as measured or determined by the means described herein. “Substantially devoid,” as used in this context, means that at least about 60%, or about 70%, or about 80%, or about 90%, or about 95%, or about 97%, or at least about 99% of the XTEN amino acid residues of the XTEN sequence do not contribute to secondary structure, as measured or determined by the methods described herein, including algorithms or spectrophotometric assays.

[0243] A variety of well-established methods and assays are known in the art for determining and confirming the physicochemical properties of the subject XTEN. Such properties include but are not limited to secondary or tertiary structure, solubility, protein aggregation, stability, absolute and apparent molecular weight, purity and uniformity, melting properties, contamination and water content. The methods to measure such properties include analytical centrifugation, EPR, HPLC-ion exchange, HPLC-size exclusion chromatography (SEC), HPLC-reverse phase, light scattering, capillary electrophoresis, circular dichroism, differential scanning calorimetry, fluorescence, HPLC-ion exchange, HPLC-size exclusion, IR, NMR, Raman spectroscopy, refractometry, and UV/Visible spectroscopy. In particular, secondary structure can be measured spectrophotometrically, e.g., by circular dichroism spectroscopy in the “far-UV” spectral region (190-250 nm). Secondary structure elements, such as alpha-helix and beta-sheet, each give rise to a characteristic shape and magnitude of CD spectra, as does the lack of these structure elements, and an exemplary CD assay of an XTEN is provided in the Examples and supports the conclusion that XTEN lack secondary structure. Secondary structure can also be predicted for a polypeptide sequence via certain computer programs or algorithms, such as the well-known Chou-Fasman algorithm (Chou, P. Y., et al. (1974) Biochemistry, 13: 222-45) and the Garnier-Osguthorpe-Robson algorithm (“Gor algorithm”) (Gamier J, Gibrat J F, Robson B. (1996), GOR method for predicting protein secondary structure from amino acid sequence. Methods Enzymol 266:540-553), as described in US Patent Application Publication No. 20030228309A1. For a given sequence, the algorithms can predict whether there exists some or no secondary structure at all, expressed as the total and/or percentage of residues of the sequence that form, for example, alpha-helices or beta-sheets or the percentage of residues of the sequence predicted to result in random coil formation (which lacks secondary structure). Polypeptide sequences can be analyzed using the Chou-Fasman algorithm using sites on the world wide web at, for example, fasta.bioch.virginia.edu/fasta_www2/fasta_www.cgi?rm=miscl and the Gor algorithm at npsa-pbil.ibcp.fr/cgi-bin/npsa_automat.pl?page=npsa_gor4.html (both accessed onOct. 30, 2015). Random coil can be determined by a variety of methods, including by using intrinsic viscosity measurements, which scale with chain length in a conformation-dependent way (Tanford, C., Kawahara, K. & Lapanje, S. (1966) J. Biol. Chem. 241, 1921-1923), as well as by size-exclusion chromatography (Squire, P. G., Calculation of hydrodynamic parameters of random coil polymers from size exclusion chromotography and comparison with parameters by conventional methods. Journal of Chromatography, 1981, 5,433-442). Additional methods are disclosed in Arnau, et al., Prot Expr and Purif (2006) 48, 1-13.

[0244] In one embodiment, the XTEN sequences used in the subject conjugates have an alpha-helix percentage ranging from 0% to less than about 5% as determined by the Chou-Fasman algorithm. In another embodiment, the XTEN sequences have a beta-sheet percentage ranging from 0% to less than about 5% as determined by the Chou-Fasman algorithm. In one embodiment, the XTEN sequences of the conjugates have an alpha-helix percentage ranging from 0% to less than about 5% and a beta-sheet percentage ranging from 0% to less than about 5% as determined by the Chou-Fasman algorithm. In one embodiment, the XTEN sequences of the conjugates have an alpha-helix percentage less than about 2% and a beta-sheet percentage less than about 2%. The XTEN sequences of the compositions have a high degree of random coil formation, as determined by the GOR algorithm. In some embodiments, an XTEN sequence has at least about 80%, more preferably at least about 90%, more preferably at least about 91%, more preferably at least about 92%, more preferably at least about 93%, more preferably at least about 94%, more preferably at least about 95%, more preferably at least about 96%, more preferably at least about 97%, more preferably at least about 98%, and most preferably at least about 99% random coil formation, as determined by the GOR algorithm. In one embodiment, the XTEN sequences of the targeted conjugate compositions have an alpha-helix percentage ranging from 0% to less than about 5% and a beta-sheet percentage ranging from 0% to less than about 5% as determined by the Chou-Fasman algorithm and at least about 90% random coil formation as determined by the GOR algorithm. In another embodiment, the XTEN sequences of the disclosed compositions have an alpha-helix percentage less than about 2% and a beta-sheet percentage less than about 2% as determined by the Chou-Fasman algorithm and at least about 90% random coil formation as determined by the GOR algorithm. In another embodiment, the XTEN sequenes of the compositions are substantially lacking secondary structure as measured by circular dichroism.

[0245] The selection criteria for the XTEN to be linked to the components used to create the targeted conjugate compositions generally relate to attributes of physicochemical properties and conformational structure of the XTEN that is, in turn, used to confer enhanced pharmaceutical, pharmacologic, and pharmacokinetic properties to the compositions.

### 1. Non-Repetitive Sequences

[0246] It is specifically contemplated that the subject XTEN sequences included in the subject conjugate composition embodiments are substantially non-repetitive. In general, repetitive amino acid sequences have a tendency to aggregate or form higher order structures, as exemplified by natural repetitive sequences such as collagens and leucine zippers. These repetitive amino acids may also tend to form contacts resulting in crystalline or pseudocrystaline structures. In contrast, the low tendency of non-repetitive sequences to aggregate enables the design of long-sequence XTENs with a relatively low frequency of charged amino acids that would otherwise be likely to aggregate if the sequences were repetitive. The non-repetitiveness of a subject XTEN can be observed by assessing one or more of the following features. In one embodiment, a substantially non-repetitive XTEN sequence has no three contiguous amino acids in the sequence that are identical amino acid types unless the amino acid is serine, in which case no more than three contiguous amino acids are serine residues. In another embodiment, as described more fully below, the invention provides a substantially non-repetitive XTEN sequence in which 80-99% of the sequence is comprised of motifs of 12 amino acid residues wherein the motifs consist of 4, 5 or 6 types of amino acids selected from glycine (G), alanine (A), serine (S), threonine (T), glutamate (E) and proline (P), and wherein the sequence of any two contiguous amino acid residues in any one motif is not repeated more than twice in the sequence motif. In another embodiment, the invention provides a substantially non-repetitive XTEN sequence in which at least about 90% of the sequence consists of motifs of 12 amino acid residues wherein the motifs consist of 4, 5 or 6 types of amino acids selected from glycine (G), alanine (A), serine (S), threonine (T), glutamate (E) and proline (P), and wherein the sequence of any two contiguous amino acid residues in any one motif is not repeated more than twice in the sequence motif. In another embodiment, the invention provides a substantially non-repetitive XTEN sequence in which at least about 90% of the sequence consists of motifs of 12 amino acid residues selected from the group consisting of the sequences set forth in Table 9. In another embodiment, the invention provides a substantially non-repetitive XTEN sequence in which at least 90%, at least 91%, at least 92%, at least 93%, at least 94%, at least 95%, at least 96%, at least 97%, at least 98%, at least 98%, or 100% of the sequence consists of motifs of 12 amino acid residues selected from the group consisting of the AE sequences set forth in Table 9. In another embodiment, the invention provides a substantially non-repetitive XTEN sequence in which at least 90%, at least 91%, at least 92%, at least 93%, at least 94%, at least 95%, at least 96%, at least 97%, at least 98%, at least 98%, or 100% of the sequence consists of motifs of 12 amino acid residues selected from the group consisting of the AF sequences set forth in Table 9. In another embodiment, the invention provides a substantially non-repetitive XTEN sequence in which at least 90%, at least 91%, at least 92%, at least 93%, at least 94%, at least 95%, at least 96%, at least 97%, at least 98%, at least 98%, or 100% of the sequence consists of motifs of 12 amino acid residues selected from the group consisting of the AG sequences set forth in Table 9.

[0247] The degree of repetitiveness of a polypeptide or a gene can be measured by computer programs or algorithms or by other means known in the art. According to the current invention, algorithms to be used in calculating the degree of repetitiveness of a particular polypeptide, such as an XTEN, are disclosed herein, and examples of sequences analyzed by algorithms are provided (see Examples, below). In one embodiment, the repetitiveness of a polypeptide of a predetermined length can be calculated (hereinafter “subsequence score”) according to the formula given by Equation I:

$$Subsequence score = \frac{{\sum }_{i = 1}^{m} {Count}_{i}}{m} \qquad I$$

wherein: m=(amino acid length of polypeptide)−(amino acid length of subsequence)+1; and Count,=cumulative number of occurrences of each unique subsequence within

[0248] sequence,

[0249] An algorithm termed “SegScore” was developed to apply the foregoing equation to quantitate repetitiveness of polypeptides, such as an XTEN, providing the subsequence score wherein sequences of a predetermined amino acid length “n” are analyzed for repetitiveness by determining the number of times (a “count”) a unique subsequence of length “s” appears in the set length, divided by the absolute number of subsequences within the predetermined length of the sequence. The subsequence score of any given polypeptide will depend on the absolute number of unique subsequences and how frequently each unique subsequence (meaning a different amino acid sequence) appears in the predetermined length of the sequence.

[0250] In the context of the present invention, “subsequence score” means the sum of occurrences of each unique 3-mer frame across 200 consecutive amino acids of the XTEN polypeptide divided by the absolute number of unique 3-mer subsequences within the 200 amino acid sequence. Examples of such subsequence scores derived from 200 consecutive amino acids of repetitive and non-repetitive polypeptides are presented in Example 32. In one embodiment, the invention provides a XTEN-conjugate comprising one XTEN in which the XTEN has a subsequence score less than 12, more preferably less than 10, more preferably less than 9, more preferably less than 8, more preferably less than 7, more preferably less than 6, and most preferably less than 5. In another embodiment, the invention provides targeted conjugate compositions comprising at least two XTEN in which each individual XTEN has a subsequence score of less than 10, or less than 9, or less than 8, or less than 7, or less than 6, or less than 5, or less. In yet another embodiment, the invention provides XTEN compositions comprising at least three linked XTEN in which each individual XTEN has a subsequence score of less than 10, or less than 9, or less than 8, or less than 7, or less than 6, or less than 5, or less. In the embodiments of the XTEN compositions described herein, an XTEN with a subsequence score of 10 or less (i.e., 9, 8, 7, etc.) is characterized as substantially non-repetitive.

[0251] In another embodiment, the average repetitiveness of a polypeptide of any length can be calculated (hereinafter “average subsequence score”) according to the formula given by Equation II:

$$Average subsequence score = \frac{{\sum }_{i = 1}^{n} ( \frac{{Count}_{i}}{m} )}{n} \qquad II$$

wherein: n=(amino acid length of polypeptide)−(amino acid length of block)+1;

m=(amino acid length of block)−(amino acid length of subsequence)+1; and

Count,=cumulative number of occurrences of each unique subsequence within block,

[0252] A second algorithm termed “BlockScore” was developed to implement the foregoing equation to quantitate the average repetitiveness of a polypeptide, such as an XTEN, so that the repetitiveness of polypeptides of different lengths could be compared. FIG. 28 depicts a logic flowchart of the BlockScore algorithm. For BlockScore (or algorithms of similar design or purpose), the subject polypeptide sequence can treated as a series of overlapping segments of equal length that are shorter than the length of the polypeptide (hereinafter, “blocks”). In turn, each block can be treated as a series of overlapping segments of equal length that are shorter than the length of the block (hereinafter, “subsequence”). The BlockScore algorithm determines a score, (hereinafter, “average subsequence score”) by first applying the SegScore algorithm to each of the individual overlapping blocks in a polypeptide to create an array of subsequence scores and then determining the average of the subsequence scores for all of the blocks of the polypeptide. For example, a polypeptide of 200 amino acid residues length has a total of 165 overlapping 36-amino acid “blocks” and 198 3-mer amino acid “subsequences”, but the number of unique 3-mer subsequences (meaning a unique specific sequence of three amino acids) found within each block will depend on the amount of repetitiveness within the block; a polypeptide with blocks with a high degree of repetitiveness will generally have fewer unique 3-mer subsequences. The average subsequence score that is generated by BlockScore or by application of the foregoing Equation II to a polypeptide is reflective of the degree of repetitiveness and the values assigned to two variables, 1) the length of the block in amino acid residues, and 2) the length of the subsequence in amino acid residues. The invention contemplates that the variable “subsequence” can be a peptide length of 3 to about 10 amino acid residues and that the variable “block” can be a peptide length of about 20 to about 800 amino acid residues. In a preferred method, and as applied (except as where noted otherwise) to the embodiments that follow, “average subsequence score” for a polypeptide is determined by application of the foregoing Equation II or the BlockScore algorithm to a polypeptide sequence wherein the block length is set at 36 amino acids and the subsequence length is set at 3 amino acids.

[0253] In some embodiments, the present invention provides targeted conjugate compositions comprising one or more XTEN in which each XTEN has a average subsequence score of 3 or less, and more preferably less than 2. In another embodiment, the invention provides targeted conjugate compositions comprising two XTEN in which at least one XTEN has a average subsequence score of 3 or less, and more preferably less than 2. In yet another embodiment, the invention provides targeted conjugate compositions comprising at least three XTEN in which each individual XTEN has an average subsequence score of 3 or less, and more preferably less than 2. In the embodiments of the targeted conjugate compositions described herein, an XTEN component of a composition with an average subsequence score of 3 or less is “substantially non-repetitive.”

[0254] It has been established that the non-repetitive characteristic of XTEN of the present invention together with the particular types of amino acids that predominate in the XTEN, rather than the absolute primary sequence, confers one or more of the enhanced physicochemical and biological properties of the XTEN and the resulting targeted conjugate composition. Accordingly, while the sequences of Tables 10 and 11 are exemplary, they are not intended to be limiting, as sequences having at least 90%, 91%, 92%, 93%, 94%, 95%, 96%, 97%, 98%, or at least 99% sequence identity to the sequences of Tables 10 and 11 exhibit the enhanced properties of XTEN. These enhanced properties include a high degree of expression of the XTEN protein in the host cell, greater genetic stability of the gene encoding XTEN, and confer a greater degree of solubility, less tendency to aggregate, and enhanced pharmacokinetics of the resulting targeted conjugate compared to payloads or proteins having repetitive sequences not conjugated to XTEN. These enhanced properties permit more efficient manufacturing, greater uniformity of the final product, lower cost of goods, and/or facilitate the formulation of pharmaceutical preparations of the subject compositions containing extremely high protein concentrations, in some cases exceeding 100 mg/ml. Additionally, the XTEN polypeptide sequences of the conjugates are designed to have a low degree of internal repetitiveness in order to reduce or substantially eliminate immunogenicity when administered to a mammal. Polypeptide sequences composed of short, repeated motifs largely limited to only three amino acids, such as glycine, serine and glutamate, may result in relatively high antibody titers when administered to a mammal despite the absence of predicted T-cell epitopes in these sequences. This may be caused by the repetitive nature of polypeptides, as it has been shown that immunogens with repeated epitopes, including protein aggregates, cross-linked immunogens, and repetitive carbohydrates are highly immunogenic and can, for example, result in the cross-linking of B-cell receptors causing B-cell activation. (Johansson, J., et al. (2007) Vaccine, 25 :1676-82; Yankai, Z., et al. (2006) Biochem Biophys Res Commun, 345 :1365-71; Hsu, C. T., et al. (2000) Cancer Res, 60:3701-5); Bachmann MF, et al. Eur J Immunol. (1995) 25(12):3445-3451).

### 2. Exemplary Sequence Motifs and XTEN Segments

[0255] The present invention encompasses XTEN used as fusion and conjugation partners that comprise multiple units of shorter sequences, or motifs, in which the amino acid sequences of the motifs are substantially non-repetitive. The non-repetitive property can be met even using a “building block” approach using a small library of sequence motifs that are multimerized to create the XTEN sequences. While an XTEN sequence may consist of multiple units of as few as four different types of sequence motifs, because the motifs themselves generally consist of non-repetitive amino acid sequences, the overall XTEN sequence is designed to render the sequence substantially non-repetitive.

[0256] It is specifically intended the range of XTEN lengths for use in the subject compositions of the disclosure are not limiting and that the XTEN can comprise any number of amino acid residues from 36 to 1500 or more and be encompassed by the embodiments of the invention.

[0257] In one embodiment, XTEN comprises a sequence in which at least 90%, or 91%, or 92%, or 93%, or 94%, or 95%, or 96%, or 97%, or 98%, or at least 99% of the amino acid residues are four to six types of amino acids selected from the group consisting of glycine (G), alanine (A), serine (S), threonine (T), glutamate (E) and proline (P) that are arranged in a substantially non-repetitive sequence. In one embodiment, an XTEN sequence is made of 4, 5, or 6 types of amino acids selected from the group consisting of glycine (G), alanine (A), serine (S), threonine (T), glutamate (E) and proline (P). In other embodiments, at least about 90%, or 91%, or 92%, or 93%, or 94%, or 95%, or 96%, or 97%, or 98%, or at least 99% of the XTEN sequence consists of non-overlapping sequence motifs wherein each of the motifs has 12 amino acid residues consisting of 4 to 6 types of amino acids selected from glycine (G), alanine (A), serine (S), threonine (T), glutamate (E) and proline (P), and wherein the content of any one amino acid type in the full-length XTEN does not exceed 40%, or 30%, or about 25%, or about 17%, or about 12%, or about 8%. In yet other embodiments, at least about 90%, or about 91%, or about 92%, or about 93%, or about 94%, or about 95%, or about 96%, or about 97%, or about 98%, or about 99%, to about 100% of the XTEN sequence consists of non-overlapping sequence motifs wherein each of the motifs has 12 amino acid residues consisting of glycine (G), alanine (A), serine (S), threonine (T), glutamate (E) and proline (P).

[0258] In some embodiments, the invention provides targeted conjugate compositions comprising one, or two, or three, or four substantially non-repetitive XTEN sequence(s) of at least about 100 to about 1200 amino acid residues each, or cumulatively about 200 to about 2000 amino acid residues wherein at least about 90%, or about 91%, or about 92%, or about 93%, or about 94%, or about 95%, or about 96%, or about 97%, or about 98%, or about 99% to about 100% of the sequence consists of multiple units of four or more non-overlapping sequence motifs selected from the amino acid sequences of Table 9. In the embodiments hereinabove described in this paragraph, the motifs or portions of the motifs incorporated into the XTEN can be selected and assembled using the methods described herein to achieve an XTEN of at least 36, at least 42, at least 72, at least 144, at least 288, at least 576, at least 864, at least 1000, at least 1500 amino acid residues, or any intermediate length. Non-limiting examples of XTEN sequences useful for incorporation into the XTEN of the subject compositions are presented in Tables 10 and 11. It is intended that a specified sequence mentioned relative to Table 10 or Table 11 has that sequence set forth in the respective table, while a generalized reference to an AE144 sequence, for example, is intended to encompass any AE sequence having 144 amino acid residues, or a generalized reference to an AG864 sequence, for example, is intended to encompass any AG sequence having 864 amino acid residues, etc.

TABLE 9
XTEN Sequence Motifs of 12 Amino Acids
and Motif Families

| Motif | | SEQ |
|---|---|---|
| Family* | Motif Sequence | ID NO: |
| AE, | GSPAGSPTSTEE | 228 |
| AE | GSEPATSGSETP | 229 |
| AE | GTSESATPESGP | 230 |
| AE | GTSTEPSEGSAP | 231 |
| AF | GSTSESPSGTAP | 232 |
| AF | GTSTPESGSASP | 233 |
| AF | GTSPSGESSTAP | 234 |
| AF | GSTSSTAESPGP | 235 |
| AG | GTPGSGTASSSP | 236 |
| AG | GSSTPSGATGSP | 237 |
| AG | GSSPSASTGTGP | 238 |
| AG | GASPGTSSTGSP | 239 |

*Denotes individual motif sequences that, when used together in various permutations, results in a “family sequence”

TABLE 10
XTEN Polypeptides

| XTEN | | SEQ ID |
|---|---|---|
| Name | Amino Acid Sequence | NO: |
| AE144 | GSEPATSGSETPGTSESATPESGPGSEPATSGSETPGSPAGSPTSTEEGTST | 240 |
| | EPSEGSAPGSEPATSGSETPGSEPATSGSETPGSEPATSGSETPGTSTEPSE | |
| | GSAPGTSESATPESGPGSEPATSGSETPGTSTEPSEGSAP | |
| AE144_1A | SPAGSPTSTEEGTSESATPESGPGTSTEPSEGSAPGSPAGSPTSTEEGTSTE | 241 |
| | PSEGSAPGTSTEPSEGSAPGTSESATPESGPGSEPATSGSETPGSEPATSGS | |
| | ETPGSPAGSPTSTEEGTSESATPESGPGTSTEPSEGSAPG | |
| AE144_2A | TSTEPSEGSAPGSPAGSPTSTEEGTSTEPSEGSAPGTSTEPSEGSAPGTSES | 242 |
| | ATPESGPGTSTEPSEGSAPGTSESATPESGPGSEPATSGSETPGTSTEPSEG | |
| | SAPGTSTEPSEGSAPGTSESATPESGPGTSESATPESGPG | |
| AE144_2B | TSTEPSEGSAPGSPAGSPTSTEEGTSTEPSEGSAPGTSTEPSEGSAPGTSES | 243 |
| | ATPESGPGTSTEPSEGSAPGTSESATPESGPGSEPATSGSETPGTSTEPSEG | |
| | SAPGTSTEPSEGSAPGTSESATPESGPGTSESATPESGPG | |
| AE144_3A | SPAGSPTSTEEGTSESATPESGPGSEPATSGSETPGTSESATPESGPGTSTE | 244 |
| | PSEGSAPGTSTEPSEGSAPGTSTEPSEGSAPGTSTEPSEGSAPGTSTEPSEG | |
| | SAPGTSTEPSEGSAPGSPAGSPTSTEEGTSTEPSEGSAPG | |
| AE144_3B | SPAGSPTSTEEGTSESATPESGPGSEPATSGSETPGTSESATPESGPGTSTE | 245 |
| | PSEGSAPGTSTEPSEGSAPGTSTEPSEGSAPGTSTEPSEGSAPGTSTEPSEG | |
| | SAPGTSTEPSEGSAPGSPAGSPTSTEEGTSTEPSEGSAPG | |
| AE144_4A | TSESATPESGPGSEPATSGSETPGTSESATPESGPGSEPATSGSETPGTSES | 246 |
| | ATPESGPGTSTEPSEGSAPGTSESATPESGPGSPAGSPTSTEEGSPAGSPTS | |
| | TEEGSPAGSPTSTEEGTSESATPESGPGTSTEPSEGSAPG | |
| AE144_4B | TSESATPESGPGSEPATSGSETPGTSESATPESGPGSEPATSGSETPGTSES | 247 |
| | ATPESGPGTSTEPSEGSAPGTSESATPESGPGSPAGSPTSTEEGSPAGSPTS | |
| | TEEGSPAGSPTSTEEGTSESATPESGPGTSTEPSEGSAPG | |
| AE144_5A | TSESATPESGPGSEPATSGSETPGTSESATPESGPGSEPATSGSETPGTSES | 248 |
| | ATPESGPGTSTEPSEGSAPGSPAGSPTSTEEGTSESATPESGPGSEPATSG | |
| | SETPGTSESATPESGPGSPAGSPTSTEEGSPAGSPTSTEEG | |
| AE144_6B | TSTEPSEGSAPGTSESATPESGPGTSESATPESGPGTSESATPESGPGSEPA | 249 |
| | TSGSETPGSEPATSGSETPGSPAGSPTSTEEGTSTEPSEGSAPGTSTEPSEG | |
| | SAPGSEPATSGSETPGTSESATPESGPGTSTEPSEGSAPG | |
| AF144 | GTSTPESGSASPGTSPSGESSTAPGTSPSGESSTAPGSTSSTAESPGPGSTS | 250 |
| | ESPSGTAPGSTSSTAESPGPGTSPSGESSTAPGTSTPESGSASPGSTSSTAE | |
| | SPGPGTSPSGESSTAPGTSPSGESSTAPGTSPSGESSTAP | |
| AG144_1 | SGTASSSPGSSTPSGATGSPGTPGSGTASSSPGSSTPSGATGSPGSSTPSG | 251 |
| | ATGSPGSSPSASTGTGPGSSPSASTGTGPGASPGTSSTGSPGTPGSGTASS | |
| | SPGSSTPSGATGSPGSSPSASTGTGPGSSPSASTGTGPGASP | |
| AG144_2 | PGSSPSASTGTGPGSSPSASTGTGPGTPGSGTASSSPGSSTPSGATGSPGS | 252 |
| | SPSASTGTGPGASPGTSSTGSPGTPGSGTASSSPGSSTPSGATGSPGTPGS | |
| | GTASSSPGASPGTSSTGSPGASPGTSSTGSPGTPGSGTASSS | |
| AG144_A | GASPGTSSTGSPGSSPSASTGTGPGSSPSASTGTGPGTPGSGTASSSPGSS | 253 |
| | TPSGATGSPGSSPSASTGTGPGASPGTSSTGSPGTPGSGTASSSPGSSTPS | |
| | GATGSPGTPGSGTASSSPGASPGTSSTGSPGASPGTSSTGSP | |
| AG144_B | GTPGSGTASSSPGSSTPSGATGSPGASPGTSSTGSPGTPGSGTASSSPGSS | 254 |
| | TPSGATGSPGSSPSASTGTGPGSSPSASTGTGPGSSTPSGATGSPGSSTPS | |
| | GATGSPGASPGTSSTGSPGASPGTSSTGSPGASPGTSSTGSP | |
| AG144_C | GTPGSGTASSSPGASPGTSSTGSPGASPGTSSTGSPGASPGTSSTGSPGSS | 255 |
| | PSASTGTGPGTPGSGTASSSPGASPGTSSTGSPGASPGTSSTGSPGASPGT | |
| | SSTGSPGSSTPSGATGSPGSSTPSGATGSPGASPGTSSTGSP | |
| AG144_F | GSSPSASTGTGPGSSPSASTGTGPGASPGTSSTGSPGASPGTSSTGSPGSS | 256 |
| | TPSGATGSPGSSPSASTGTGPGASPGTSSTGSPGSSPSASTGTGPGTPGSG | |
| | TASSSPGSSTPSGATGSPGSSTPSGATGSPGASPGTSSTGSP | |
| AG144_3 | GTPGSGTASSSPGSSTPSGATGSPGSSTPSGATGSPGSSPSASTGTGPGSS | 257 |
| | PSASTGTGPGASPGTSSTGSPGTPGSGTASSSPGSSTPSGATGSPGSSPSA | |
| | STGTGPGSSPSASTGTGPGASPGTSSTGSPGASPGTSSTGSP | |
| AG144_4 | GTPGSGTASSSPGSSTPSGATGSPGSSPSASTGTGPGSSPSASTGTGPGAS | 258 |
| | PGTSSTGSPGASPGTSSTGSPGSSTPSGATGSPGSSPSASTGTGPGASPGT | |
| | SSTGSPGSSPSASTGTGPGTPGSGTASSSPGSSTPSGATGSP | |
| AE288_1 | GTSESATPESGPGSEPATSGSETPGTSESATPESGPGSEPATSGSETPGTSE | 259 |
| | SATPESGPGTSTEPSEGSAPGSPAGSPTSTEEGTSESATPESGPGSEPATS | |
| | GSETPGTSESATPESGPGSPAGSPTSTEEGSPAGSPTSTEEGTSTEPSEGSA | |
| | PGTSESATPESGPGTSESATPESGPGTSESATPESGPGSEPATSGSETPGSE | |
| | PATSGSETPGSPAGSPTSTEEGTSTEPSEGSAPGTSTEPSEGSAPGSEPATS | |
| | GSETPGTSESATPESGPGTSTEPSEGSAP | |
| AE288_2 | GSPAGSPTSTEEGTSESATPESGPGSEPATSGSETPGTSESATPESGPGTST | 260 |
| | EPSEGSAPGTSTEPSEGSAPGTSTEPSEGSAPGTSTEPSEGSAPGTSTEPSE | |
| | GSAPGTSTEPSEGSAPGSPAGSPTSTEEGTSTEPSEGSAPGTSESATPESG | |
| | PGSEPATSGSETPGTSESATPESGPGSEPATSGSETPGTSESATPESGPGTS | |
| | TEPSEGSAPGTSESATPESGPGSPAGSPTSTEEGSPAGSPTSTEEGSPAGSP | |
| | TSTEEGTSESATPESGPGTSTEPSEGSAP | |
| AG288_1 | PGASPGTSSTGSPGASPGTSSTGSPGTPGSGTASSSPGSSTPSGATGSPGT | 261 |
| | PGSGTASSSPGSSTPSGATGSPGTPGSGTASSSPGSSTPSGATGSPGSSTPS | |
| | GATGSPGSSPSASTGTGPGSSPSASTGTGPGASPGTSSTGSPGTPGSGTAS | |
| | SSPGSSTPSGATGSPGSSPSASTGTGPGSSPSASTGTGPGASPGTSSTGSP | |
| | GASPGTSSTGSPGSSTPSGATGSPGSSPSASTGTGPGASPGTSSTGSPGSS | |
| | PSASTGTGPGTPGSGTASSSPGSSTPSGATGS | |
| AG288_2 | GSSPSASTGTGPGSSPSASTGTGPGTPGSGTASSSPGSSTPSGATGSPGSS | 262 |
| | PSASTGTGPGASPGTSSTGSPGTPGSGTASSSPGSSTPSGATGSPGTPGSG | |
| | TASSSPGASPGTSSTGSPGASPGTSSTGSPGTPGSGTASSSPGSSTPSGAT | |
| | GSPGASPGTSSTGSPGTPGSGTASSSPGSSTPSGATGSPGSSPSASTGTGP | |
| | GSSPSASTGTGPGSSTPSGATGSPGSSTPSGATGSPGASPGTSSTGSPGAS | |
| | PGTSSTGSPGASPGTSSTGSPGTPGSGTASSSP | |
| AF540 | GSTSSTAESPGPGSTSSTAESPGPGSTSESPSGTAPGSTSSTAESPGPGSTS | 263 |
| | STAESPGPGTSTPESGSASPGSTSESPSGTAPGTSPSGESSTAPGSTSESPS | |
| | GTAPGSTSESPSGTAPGTSPSGESSTAPGSTSESPSGTAPGSTSESPSGTAP | |
| | GTSPSGESSTAPGSTSESPSGTAPGSTSESPSGTAPGSTSESPSGTAPGTST | |
| | PESGSASPGSTSESPSGTAPGTSTPESGSASPGSTSSTAESPGPGSTSSTAE | |
| | SPGPGTSTPESGSASPGTSTPESGSASPGSTSESPSGTAPGTSTPESGSASP | |
| | GTSTPESGSASPGSTSESPSGTAPGSTSESPSGTAPGSTSESPSGTAPGSTS | |
| | STAESPGPGTSTPESGSASPGTSTPESGSASPGSTSESPSGTAPGSTSESPS | |
| | GTAPGTSTPESGSASPGSTSESPSGTAPGSTSESPSGTAPGTSTPESGSASP | |
| | GTSPSGESSTAPGSTSSTAESPGPGTSPSGESSTAPGSTSSTAESPGPGTST | |
| | PESGSASPGSTSESPSGTAP | |
| AE576 | GSPAGSPTSTEEGTSESATPESGPGTSTEPSEGSAPGSPAGSPTSTEEGTST | 264 |
| | EPSEGSAPGTSTEPSEGSAPGTSESATPESGPGSEPATSGSETPGSEPATS | |
| | GSETPGSPAGSPTSTEEGTSESATPESGPGTSTEPSEGSAPGTSTEPSEGSA | |
| | PGSPAGSPTSTEEGTSTEPSEGSAPGTSTEPSEGSAPGTSESATPESGPGTS | |
| | TEPSEGSAPGTSESATPESGPGSEPATSGSETPGTSTEPSEGSAPGTSTEPS | |
| | EGSAPGTSESATPESGPGTSESATPESGPGSPAGSPTSTEEGTSESATPES | |
| | GPGSEPATSGSETPGTSESATPESGPGTSTEPSEGSAPGTSTEPSEGSAPG | |
| | TSTEPSEGSAPGTSTEPSEGSAPGTSTEPSEGSAPGTSTEPSEGSAPGSPA | |
| | GSPTSTEEGTSTEPSEGSAPGTSESATPESGPGSEPATSGSETPGTSESATP | |
| | ESGPGSEPATSGSETPGTSESATPESGPGTSTEPSEGSAPGTSESATPESGP | |
| | GSPAGSPTSTEEGSPAGSPTSTEEGSPAGSPTSTEEGTSESATPESGPGTST | |
| | EPSEGSAP | |
| AF576 | GSTSSTAESPGPGSTSSTAESPGPGSTSESPSGTAPGSTSSTAESPGPGSTS | 265 |
| | STAESPGPGTSTPESGSASPGSTSESPSGTAPGTSPSGESSTAPGSTSESPS | |
| | GTAPGSTSESPSGTAPGTSPSGESSTAPGSTSESPSGTAPGSTSESPSGTAP | |
| | GTSPSGESSTAPGSTSESPSGTAPGSTSESPSGTAPGSTSESPSGTAPGTST | |
| | PESGSASPGSTSESPSGTAPGTSTPESGSASPGSTSSTAESPGPGSTSSTAE | |
| | SPGPGTSTPESGSASPGTSTPESGSASPGSTSESPSGTAPGTSTPESGSASP | |
| | GTSTPESGSASPGSTSESPSGTAPGSTSESPSGTAPGSTSESPSGTAPGSTS | |
| | STAESPGPGTSTPESGSASPGTSTPESGSASPGSTSESPSGTAPGSTSESPS | |
| | GTAPGTSTPESGSASPGSTSESPSGTAPGSTSESPSGTAPGTSTPESGSASP | |
| | GTSPSGESSTAPGSTSSTAESPGPGTSPSGESSTAPGSTSSTAESPGPGTST | |
| | PESGSASPGSTSESPSGTAPGSTSSTAESPGPGTSTPESGSASPGTSTPESG | |
| | SASP | |
| AGS 76 | PGTPGSGTASSSPGSSTPSGATGSPGSSPSASTGTGPGSSPSASTGTGPGS | 266 |
| | STPSGATGSPGSSTPSGATGSPGASPGTSSTGSPGASPGTSSTGSPGASPG | |
| | TSSTGSPGTPGSGTASSSPGASPGTSSTGSPGASPGTSSTGSPGASPGTSS | |
| | TGSPGSSPSASTGTGPGTPGSGTASSSPGASPGTSSTGSPGASPGTSSTGS | |
| | PGASPGTSSTGSPGSSTPSGATGSPGSSTPSGATGSPGASPGTSSTGSPGT | |
| | PGSGTASSSPGSSTPSGATGSPGSSTPSGATGSPGSSTPSGATGSPGSSPS | |
| | ASTGTGPGASPGTSSTGSPGASPGTSSTGSPGTPGSGTASSSPGASPGTSS | |
| | TGSPGASPGTSSTGSPGASPGTSSTGSPGASPGTSSTGSPGTPGSGTASSS | |
| | PGSSTPSGATGSPGTPGSGTASSSPGSSTPSGATGSPGTPGSGTASSSPGS | |
| | STPSGATGSPGSSTPSGATGSPGSSPSASTGTGPGSSPSASTGTGPGASPG | |
| | TSSTGSPGTPGSGTASSSPGSSTPSGATGSPGSSPSASTGTGPGSSPSASTG | |
| | TGPGASPGTSSTGS | |
| AE624 | MAEPAGSPTSTEEGTPGSGTASSSPGSSTPSGATGSPGASPGTSSTGSPGS | 267 |
| | PAGSPTSTEEGTSESATPESGPGTSTEPSEGSAPGSPAGSPTSTEEGTSTEP | |
| | SEGSAPGTSTEPSEGSAPGTSESATPESGPGSEPATSGSETPGSEPATSGS | |
| | ETPGSPAGSPTSTEEGTSESATPESGPGTSTEPSEGSAPGTSTEPSEGSAPG | |
| | SPAGSPTSTEEGTSTEPSEGSAPGTSTEPSEGSAPGTSESATPESGPGTSTE | |
| | PSEGSAPGTSESATPESGPGSEPATSGSETPGTSTEPSEGSAPGTSTEPSEG | |
| | SAPGTSESATPESGPGTSESATPESGPGSPAGSPTSTEEGTSESATPESGP | |
| | GSEPATSGSETPGTSESATPESGPGTSTEPSEGSAPGTSTEPSEGSAPGTST | |
| | EPSEGSAPGTSTEPSEGSAPGTSTEPSEGSAPGTSTEPSEGSAPGSPAGSPT | |
| | STEEGTSTEPSEGSAPGTSESATPESGPGSEPATSGSETPGTSESATPESGP | |
| | GSEPATSGSETPGTSESATPESGPGTSTEPSEGSAPGTSESATPESGPGSP | |
| | AGSPTSTEEGSPAGSPTSTEEGSPAGSPTSTEEGTSESATPESGPGTSTEPS | |
| | EGSAP | |
| AE864 | GSPAGSPTSTEEGTSESATPESGPGTSTEPSEGSAPGSPAGSPTSTEEGTST | 268 |
| | EPSEGSAPGTSTEPSEGSAPGTSESATPESGPGSEPATSGSETPGSEPATS | |
| | GSETPGSPAGSPTSTEEGTSESATPESGPGTSTEPSEGSAPGTSTEPSEGSA | |
| | PGSPAGSPTSTEEGTSTEPSEGSAPGTSTEPSEGSAPGTSESATPESGPGTS | |
| | TEPSEGSAPGTSESATPESGPGSEPATSGSETPGTSTEPSEGSAPGTSTEPS | |
| | EGSAPGTSESATPESGPGTSESATPESGPGSPAGSPTSTEEGTSESATPES | |
| | GPGSEPATSGSETPGTSESATPESGPGTSTEPSEGSAPGTSTEPSEGSAPG | |
| | TSTEPSEGSAPGTSTEPSEGSAPGTSTEPSEGSAPGTSTEPSEGSAPGSPA | |
| | GSPTSTEEGTSTEPSEGSAPGTSESATPESGPGSEPATSGSETPGTSESATP | |
| | ESGPGSEPATSGSETPGTSESATPESGPGTSTEPSEGSAPGTSESATPESGP | |
| | GSPAGSPTSTEEGSPAGSPTSTEEGSPAGSPTSTEEGTSESATPESGPGTST | |
| | EPSEGSAPGTSESATPESGPGSEPATSGSETPGTSESATPESGPGSEPATS | |
| | GSETPGTSESATPESGPGTSTEPSEGSAPGSPAGSPTSTEEGTSESATPESG | |
| | PGSEPATSGSETPGTSESATPESGPGSPAGSPTSTEEGSPAGSPTSTEEGTS | |
| | TEPSEGSAPGTSESATPESGPGTSESATPESGPGTSESATPESGPGSEPATS | |
| | GSETPGSEPATSGSETPGSPAGSPTSTEEGTSTEPSEGSAPGTSTEPSEGSA | |
| | PGSEPATSGSETPGTSESATPESGPGTSTEPSEGSAP | |
| AF864 | GSTSSTAESPGPGSTSSTAESPGPGSTSESPSGTAPGSTSSTAESPGPGSTS | 269 |
| | STAESPGPGTSTPESGSASPGSTSESPSGTAPGTSPSGESSTAPGSTSESPS | |
| | GTAPGSTSESPSGTAPGTSPSGESSTAPGSTSESPSGTAPGSTSESPSGTAP | |
| | GTSPSGESSTAPGSTSESPSGTAPGSTSESPSGTAPGSTSESPSGTAPGTST | |
| | PESGSASPGSTSESPSGTAPGTSTPESGSASPGSTSSTAESPGPGSTSSTAE | |
| | SPGPGTSTPESGSASPGTSTPESGSASPGSTSESPSGTAPGTSTPESGSASP | |
| | GTSTPESGSASPGSTSESPSGTAPGSTSESPSGTAPGSTSESPSGTAPGSTS | |
| | STAESPGPGTSTPESGSASPGTSTPESGSASPGSTSESPSGTAPGSTSESPS | |
| | GTAPGTSTPESGSASPGSTSESPSGTAPGSTSESPSGTAPGTSTPESGSASP | |
| | GTSPSGESSTAPGSTSSTAESPGPGTSPSGESSTAPGSTSSTAESPGPGTST | |
| | PESGSASPGSTSESPSGTAPGSTSSTAESPGPGTSTPESGSASPGTSTPESG | |
| | SASPGSTSSTAESPGPGTSPSGESSTAPGTSTPESGSASPGSTSESPSGTAP | |
| | GSTSESPSGTAPGTSTPESGSASPGTSPSGESSTAPGSTSSTAESPGPGTSP | |
| | SGESSTAPGSTSSTAESPGPGSTSSTAESPGPGTSPSGESSTAPGSTSESPS | |
| | GTAPGSTSESPSGTAPGTSTPESGSASPGSTSESPSGTAPGSTSESPSGTAP | |
| | GTSTPESGSASPGSTSESPSGTAPGSTSESPSGTAPGSTSESPSGTAPGSTS | |
| | STAESPGPGTSPSGESSTAPGTSPSGESSTAP | |
| AG864_2 | GASPGTSSTGSPGSSPSASTGTGPGSSPSASTGTGPGTPGSGTASSSPGSS | 270 |
| | TPSGATGSPGSSPSASTGTGPGASPGTSSTGSPGTPGSGTASSSPGSSTPS | |
| | GATGSPGTPGSGTASSSPGASPGTSSTGSPGASPGTSSTGSPGTPGSGTAS | |
| | SSPGSSTPSGATGSPGASPGTSSTGSPGTPGSGTASSSPGSSTPSGATGSP | |
| | GSSPSASTGTGPGSSPSASTGTGPGSSTPSGATGSPGSSTPSGATGSPGAS | |
| | PGTSSTGSPGASPGTSSTGSPGASPGTSSTGSPGTPGSGTASSSPGASPGT | |
| | SSTGSPGASPGTSSTGSPGASPGTSSTGSPGSSPSASTGTGPGTPGSGTAS | |
| | SSPGASPGTSSTGSPGASPGTSSTGSPGASPGTSSTGSPGSSTPSGATGSP | |
| | GSSTPSGATGSPGASPGTSSTGSPGTPGSGTASSSPGSSTPSGATGSPGSS | |
| | TPSGATGSPGSSTPSGATGSPGSSPSASTGTGPGASPGTSSTGSPGASPGT | |
| | SSTGSPGTPGSGTASSSPGASPGTSSTGSPGASPGTSSTGSPGASPGTSST | |
| | GSPGASPGTSSTGSPGTPGSGTASSSPGSSTPSGATGSPGTPGSGTASSSP | |
| | GSSTPSGATGSPGTPGSGTASSSPGSSTPSGATGSPGSSTPSGATGSPGSS | |
| | PSASTGTGPGSSPSASTGTGPGASPGTSSTGSPGTPGSGTASSSPGSSTPS | |
| | GATGSPGSSPSASTGTGPGSSPSASTGTGPGASPGTSSTGSPGASPGTSST | |
| | GSPGSSTPSGATGSPGSSPSASTGTGPGASPGTSSTGSPGSSPSASTGTGP | |
| | GTPGSGTASSSPGSSTPSGATGSPGSSTPSGATGSPGASPGTSSTGSP | |
| AE108A | TEEGTSESATPESGPGTSTEPSEGSAPGSPAGSPTSTEEGTSTEPSEGSAP | 271 |
| | GTSTEPSEGSAPGTSESATPESGPGSEPATSGSETPGSEPATSGSETPGSP | |
| | AGSPTS | |
| AE108B | GSPAGSPTSTEEGTSTEPSEGSAPGTSESATPESGPGTSESATPESGPGTSE | 272 |
| | SATPESGPGSEPATSGSETPGSEPATSGSETPGSPAGSPTSTEEGTSTEPSE | |
| | GSAP | |
| AE144A | STEPSEGSAPGSPAGSPTSTEEGTSTEPSEGSAPGTSESATPESGPGSEPAT | 273 |
| | SGSETPGTSESATPESGPGSEPATSGSETPGTSESATPESGPGTSTEPSEGS | |
| | APGTSESATPESGPGSPAGSPTSTEEGSPAGSPTSTEEGS | |
| AE144B | SEPATSGSETPGTSESATPESGPGSEPATSGSETPGTSESATPESGPGTSTE | 274 |
| | PSEGSAPGSPAGSPTSTEEGTSESATPESGPGSEPATSGSETPGTSESATPE | |
| | SGPGSPAGSPTSTEEGSPAGSPTSTEEGTSTEPSEGSAPG | |
| AE180A | TSTEEGTSESATPESGPGSEPATSGSETPGTSESATPESGPGSPAGSPTSTE | 275 |
| | EGSPAGSPTSTEEGTSTEPSEGSAPGTSESATPESGPGTSESATPESGPGTS | |
| | ESATPESGPGSEPATSGSETPGSEPATSGSETPGSPAGSPTSTEEGTSTEPS | |
| | EGSAPGTSTEPSEGSAPGSEPATS | |
| AE216A | PESGPGTSTEPSEGSAPGSPAGSPTSTEEGTSESATPESGPGSEPATSGSET | 276 |
| | PGTSESATPESGPGSPAGSPTSTEEGSPAGSPTSTEEGTSTEPSEGSAPGTS | |
| | ESATPESGPGTSESATPESGPGTSESATPESGPGSEPATSGSETPGSEPATS | |
| | GSETPGSPAGSPTSTEEGTSTEPSEGSAPGTSTEPSEGSAPGSEPATSGSET | |
| | PGTSESAT | |
| AE252A | ESGPGSEPATSGSETPGTSESATPESGPGTSTEPSEGSAPGSPAGSPTSTEE | 277 |
| | GTSESATPESGPGSEPATSGSETPGTSESATPESGPGSPAGSPTSTEEGSP | |
| | AGSPTSTEEGTSTEPSEGSAPGTSESATPESGPGTSESATPESGPGTSESA | |
| | TPESGPGSEPATSGSETPGSEPATSGSETPGSPAGSPTSTEEGTSTEPSEGS | |
| | APGTSTEPSEGSAPGSEPATSGSETPGTSESATPESGPGTSTEPSE | |
| AE288A | TPESGPGTSTEPSEGSAPGTSESATPESGPGSEPATSGSETPGTSESATPES | 278 |
| | GPGSEPATSGSETPGTSESATPESGPGTSTEPSEGSAPGSPAGSPTSTEEG | |
| | TSESATPESGPGSEPATSGSETPGTSESATPESGPGSPAGSPTSTEEGSPA | |
| | GSPTSTEEGTSTEPSEGSAPGTSESATPESGPGTSESATPESGPGTSESATP | |
| | ESGPGSEPATSGSETPGSEPATSGSETPGSPAGSPTSTEEGTSTEPSEGSAP | |
| | GTSTEPSEGSAPGSEPATSGSETPGTSESA | |
| AE324A | PESGPGSPAGSPTSTEEGSPAGSPTSTEEGSPAGSPTSTEEGTSESATPESG | 279 |
| | PGTSTEPSEGSAPGTSESATPESGPGSEPATSGSETPGTSESATPESGPGSE | |
| | PATSGSETPGTSESATPESGPGTSTEPSEGSAPGSPAGSPTSTEEGTSESAT | |
| | PESGPGSEPATSGSETPGTSESATPESGPGSPAGSPTSTEEGSPAGSPTSTE | |
| | EGTSTEPSEGSAPGTSESATPESGPGTSESATPESGPGTSESATPESGPGSE | |
| | PATSGSETPGSEPATSGSETPGSPAGSPTSTEEGTSTEPSEGSAPGTSTEPS | |
| | EGSAPGSEPATS | |
| AE360A | PESGPGTSTEPSEGSAPGTSESATPESGPGSPAGSPTSTEEGSPAGSPTSTE | 280 |
| | EGSPAGSPTSTEEGTSESATPESGPGTSTEPSEGSAPGTSESATPESGPGSE | |
| | PATSGSETPGTSESATPESGPGSEPATSGSETPGTSESATPESGPGTSTEPS | |
| | EGSAPGSPAGSPTSTEEGTSESATPESGPGSEPATSGSETPGTSESATPES | |
| | GPGSPAGSPTSTEEGSPAGSPTSTEEGTSTEPSEGSAPGTSESATPESGPG | |
| | TSESATPESGPGTSESATPESGPGSEPATSGSETPGSEPATSGSETPGSPA | |
| | GSPTSTEEGTSTEPSEGSAPGTSTEPSEGSAPGSEPATSGSETPGTSESAT | |
| AE396A | PESGPGSEPATSGSETPGTSESATPESGPGTSTEPSEGSAPGTSESATPESG | 281 |
| | PGSPAGSPTSTEEGSPAGSPTSTEEGSPAGSPTSTEEGTSESATPESGPGTS | |
| | TEPSEGSAPGTSESATPESGPGSEPATSGSETPGTSESATPESGPGSEPATS | |
| | GSETPGTSESATPESGPGTSTEPSEGSAPGSPAGSPTSTEEGTSESATPESG | |
| | PGSEPATSGSETPGTSESATPESGPGSPAGSPTSTEEGSPAGSPTSTEEGTS | |
| | TEPSEGSAPGTSESATPESGPGTSESATPESGPGTSESATPESGPGSEPATS | |
| | GSETPGSEPATSGSETPGSPAGSPTSTEEGTSTEPSEGSAPGTSTEPS | |
| AE432A | EGSAPGSPAGSPTSTEEGTSTEPSEGSAPGTSESATPESGPGSEPATSGSE | 282 |
| | TPGTSESATPESGPGSEPATSGSETPGTSESATPESGPGTSTEPSEGSAPGT | |
| | SESATPESGPGSPAGSPTSTEEGSPAGSPTSTEEGSPAGSPTSTEEGTSESA | |
| | TPESGPGTSTEPSEGSAPGTSESATPESGPGSEPATSGSETPGTSESATPES | |
| | GPGSEPATSGSETPGTSESATPESGPGTSTEPSEGSAPGSPAGSPTSTEEG | |
| | TSESATPESGPGSEPATSGSETPGTSESATPESGPGSPAGSPTSTEEGSPA | |
| | GSPTSTEEGTSTEPSEGSAPGTSESATPESGPGTSESATPESGPGTSESATP | |
| | ESGPGSEPATSGSETPGSEPATSGSETPGSPAGSPTSTEEGTSTEPSEGSAP | |
| | GTSTEPSEGSAPGSEPATS | |
| AE468A | EGSAPGTSTEPSEGSAPGTSTEPSEGSAPGSPAGSPTSTEEGTSTEPSEGS | 283 |
| | APGTSESATPESGPGSEPATSGSETPGTSESATPESGPGSEPATSGSETPG | |
| | TSESATPESGPGTSTEPSEGSAPGTSESATPESGPGSPAGSPTSTEEGSPA | |
| | GSPTSTEEGSPAGSPTSTEEGTSESATPESGPGTSTEPSEGSAPGTSESATP | |
| | ESGPGSEPATSGSETPGTSESATPESGPGSEPATSGSETPGTSESATPESGP | |
| | GTSTEPSEGSAPGSPAGSPTSTEEGTSESATPESGPGSEPATSGSETPGTSE | |
| | SATPESGPGSPAGSPTSTEEGSPAGSPTSTEEGTSTEPSEGSAPGTSESATP | |
| | ESGPGTSESATPESGPGTSESATPESGPGSEPATSGSETPGSEPATSGSETP | |
| | GSPAGSPTSTEEGTSTEPSEGSAPGTSTEPSEGSAPGSEPATSGSETPGTSE | |
| | SAT | |
| AE504A | EGSAPGTSTEPSEGSAPGTSTEPSEGSAPGTSTEPSEGSAPGTSTEPSEGS | 284 |
| | APGSPAGSPTSTEEGTSTEPSEGSAPGTSESATPESGPGSEPATSGSETPG | |
| | TSESATPESGPGSEPATSGSETPGTSESATPESGPGTSTEPSEGSAPGTSES | |
| | ATPESGPGSPAGSPTSTEEGSPAGSPTSTEEGSPAGSPTSTEEGTSESATPE | |
| | SGPGTSTEPSEGSAPGTSESATPESGPGSEPATSGSETPGTSESATPESGP | |
| | GSEPATSGSETPGTSESATPESGPGTSTEPSEGSAPGSPAGSPTSTEEGTSE | |
| | SATPESGPGSEPATSGSETPGTSESATPESGPGSPAGSPTSTEEGSPAGSPT | |
| | STEEGTSTEPSEGSAPGTSESATPESGPGTSESATPESGPGTSESATPESGP | |
| | GSEPATSGSETPGSEPATSGSETPGSPAGSPTSTEEGTSTEPSEGSAPGTST | |
| | EPSEGSAPGSEPATSGSETPGTSESATPESGPGTSTEPS | |
| AE540A | TPESGPGSPAGSPTSTEEGTSESATPESGPGSEPATSGSETPGTSESATPES | 285 |
| | GPGTSTEPSEGSAPGTSTEPSEGSAPGTSTEPSEGSAPGTSTEPSEGSAPG | |
| | TSTEPSEGSAPGTSTEPSEGSAPGSPAGSPTSTEEGTSTEPSEGSAPGTSES | |
| | ATPESGPGSEPATSGSETPGTSESATPESGPGSEPATSGSETPGTSESATPE | |
| | SGPGTSTEPSEGSAPGTSESATPESGPGSPAGSPTSTEEGSPAGSPTSTEE | |
| | GSPAGSPTSTEEGTSESATPESGPGTSTEPSEGSAPGTSESATPESGPGSEP | |
| | ATSGSETPGTSESATPESGPGSEPATSGSETPGTSESATPESGPGTSTEPSE | |
| | GSAPGSPAGSPTSTEEGTSESATPESGPGSEPATSGSETPGTSESATPESG | |
| | PGSPAGSPTSTEEGSPAGSPTSTEEGTSTEPSEGSAPGTSESATPESGPGTS | |
| | ESATPESGPGTSESATPESGPGSEPATSGSETPGSEPATSGSETPGSPAGSP | |
| | TSTEEGTSTEPSEGSAPGTSTEP | |
| AE576A | TPESGPGTSESATPESGPGSPAGSPTSTEEGTSESATPESGPGSEPATSGSE | 286 |
| | TPGTSESATPESGPGTSTEPSEGSAPGTSTEPSEGSAPGTSTEPSEGSAPGT | |
| | STEPSEGSAPGTSTEPSEGSAPGTSTEPSEGSAPGSPAGSPTSTEEGTSTEP | |
| | SEGSAPGTSESATPESGPGSEPATSGSETPGTSESATPESGPGSEPATSGS | |
| | ETPGTSESATPESGPGTSTEPSEGSAPGTSESATPESGPGSPAGSPTSTEEG | |
| | SPAGSPTSTEEGSPAGSPTSTEEGTSESATPESGPGTSTEPSEGSAPGTSES | |
| | ATPESGPGSEPATSGSETPGTSESATPESGPGSEPATSGSETPGTSESATPE | |
| | SGPGTSTEPSEGSAPGSPAGSPTSTEEGTSESATPESGPGSEPATSGSETP | |
| | GTSESATPESGPGSPAGSPTSTEEGSPAGSPTSTEEGTSTEPSEGSAPGTSE | |
| | SATPESGPGTSESATPESGPGTSESATPESGPGSEPATSGSETPGSEPATS | |
| | GSETPGSPAGSPTSTEEGTSTEPSEGSAPGTSTEPSEGSAPGSEPATSGSET | |
| | PGTSESA | |
| AE612A | GSETPGTSTEPSEGSAPGTSTEPSEGSAPGTSESATPESGPGTSESATPESG | 287 |
| | PGSPAGSPTSTEEGTSESATPESGPGSEPATSGSETPGTSESATPESGPGTS | |
| | TEPSEGSAPGTSTEPSEGSAPGTSTEPSEGSAPGTSTEPSEGSAPGTSTEPS | |
| | EGSAPGTSTEPSEGSAPGSPAGSPTSTEEGTSTEPSEGSAPGTSESATPES | |
| | GPGSEPATSGSETPGTSESATPESGPGSEPATSGSETPGTSESATPESGPG | |
| | TSTEPSEGSAPGTSESATPESGPGSPAGSPTSTEEGSPAGSPTSTEEGSPA | |
| | GSPTSTEEGTSESATPESGPGTSTEPSEGSAPGTSESATPESGPGSEPATSG | |
| | SETPGTSESATPESGPGSEPATSGSETPGTSESATPESGPGTSTEPSEGSAP | |
| | GSPAGSPTSTEEGTSESATPESGPGSEPATSGSETPGTSESATPESGPGSP | |
| | AGSPTSTEEGSPAGSPTSTEEGTSTEPSEGSAPGTSESATPESGPGTSESA | |
| | TPESGPGTSESATPESGPGSEPATSGSETPGSEPATSGSETPGSPAGSPTST | |
| | EEGTSTEPSEGSAPGTSTEPSEGSAPGSEPATSGSETPGTSESAT | |
| AE648A | PESGPGTSTEPSEGSAPGTSESATPESGPGSEPATSGSETPGTSTEPSEGSA | 288 |
| | PGTSTEPSEGSAPGTSESATPESGPGTSESATPESGPGSPAGSPTSTEEGTS | |
| | ESATPESGPGSEPATSGSETPGTSESATPESGPGTSTEPSEGSAPGTSTEPS | |
| | EGSAPGTSTEPSEGSAPGTSTEPSEGSAPGTSTEPSEGSAPGTSTEPSEGS | |
| | APGSPAGSPTSTEEGTSTEPSEGSAPGTSESATPESGPGSEPATSGSETPG | |
| | TSESATPESGPGSEPATSGSETPGTSESATPESGPGTSTEPSEGSAPGTSES | |
| | ATPESGPGSPAGSPTSTEEGSPAGSPTSTEEGSPAGSPTSTEEGTSESATPE | |
| | SGPGTSTEPSEGSAPGTSESATPESGPGSEPATSGSETPGTSESATPESGP | |
| | GSEPATSGSETPGTSESATPESGPGTSTEPSEGSAPGSPAGSPTSTEEGTSE | |
| | SATPESGPGSEPATSGSETPGTSESATPESGPGSPAGSPTSTEEGSPAGSPT | |
| | STEEGTSTEPSEGSAPGTSESATPESGPGTSESATPESGPGTSESATPESGP | |
| | GSEPATSGSETPGSEPATSGSETPGSPAGSPTSTEEGTSTEPSEGSAPGTST | |
| | EPSEGSAPGSEPATSGSETPGTSESAT | |
| AE684A | EGSAPGSPAGSPTSTEEGTSTEPSEGSAPGTSTEPSEGSAPGTSESATPES | 289 |
| | GPGTSTEPSEGSAPGTSESATPESGPGSEPATSGSETPGTSTEPSEGSAPG | |
| | TSTEPSEGSAPGTSESATPESGPGTSESATPESGPGSPAGSPTSTEEGTSES | |
| | ATPESGPGSEPATSGSETPGTSESATPESGPGTSTEPSEGSAPGTSTEPSEG | |
| | SAPGTSTEPSEGSAPGTSTEPSEGSAPGTSTEPSEGSAPGTSTEPSEGSAP | |
| | GSPAGSPTSTEEGTSTEPSEGSAPGTSESATPESGPGSEPATSGSETPGTSE | |
| | SATPESGPGSEPATSGSETPGTSESATPESGPGTSTEPSEGSAPGTSESATP | |
| | ESGPGSPAGSPTSTEEGSPAGSPTSTEEGSPAGSPTSTEEGTSESATPESGP | |
| | GTSTEPSEGSAPGTSESATPESGPGSEPATSGSETPGTSESATPESGPGSEP | |
| | ATSGSETPGTSESATPESGPGTSTEPSEGSAPGSPAGSPTSTEEGTSESATP | |
| | ESGPGSEPATSGSETPGTSESATPESGPGSPAGSPTSTEEGSPAGSPTSTEE | |
| | GTSTEPSEGSAPGTSESATPESGPGTSESATPESGPGTSESATPESGPGSEP | |
| | ATSGSETPGSEPATSGSETPGSPAGSPTSTEEGTSTEPSEGSAPGTSTEPSE | |
| | GSAPGSEPATS | |
| AE720A | TSGSETPGSEPATSGSETPGSPAGSPTSTEEGTSESATPESGPGTSTEPSEG | 290 |
| | SAPGTSTEPSEGSAPGSPAGSPTSTEEGTSTEPSEGSAPGTSTEPSEGSAP | |
| | GTSESATPESGPGTSTEPSEGSAPGTSESATPESGPGSEPATSGSETPGTST | |
| | EPSEGSAPGTSTEPSEGSAPGTSESATPESGPGTSESATPESGPGSPAGSPT | |
| | STEEGTSESATPESGPGSEPATSGSETPGTSESATPESGPGTSTEPSEGSAP | |
| | GTSTEPSEGSAPGTSTEPSEGSAPGTSTEPSEGSAPGTSTEPSEGSAPGTST | |
| | EPSEGSAPGSPAGSPTSTEEGTSTEPSEGSAPGTSESATPESGPGSEPATS | |
| | GSETPGTSESATPESGPGSEPATSGSETPGTSESATPESGPGTSTEPSEGSA | |
| | PGTSESATPESGPGSPAGSPTSTEEGSPAGSPTSTEEGSPAGSPTSTEEGTS | |
| | ESATPESGPGTSTEPSEGSAPGTSESATPESGPGSEPATSGSETPGTSESAT | |
| | PESGPGSEPATSGSETPGTSESATPESGPGTSTEPSEGSAPGSPAGSPTSTE | |
| | EGTSESATPESGPGSEPATSGSETPGTSESATPESGPGSPAGSPTSTEEGSP | |
| | AGSPTSTEEGTSTEPSEGSAPGTSESATPESGPGTSESATPESGPGTSESA | |
| | TPESGPGSEPATSGSETPGSEPATSGSETPGSPAGSPTSTEEGTSTE | |
| AE756A | TSGSETPGSEPATSGSETPGSPAGSPTSTEEGTSESATPESGPGTSTEPSEG | 291 |
| | SAPGTSTEPSEGSAPGSPAGSPTSTEEGTSTEPSEGSAPGTSTEPSEGSAP | |
| | GTSESATPESGPGTSTEPSEGSAPGTSESATPESGPGSEPATSGSETPGTST | |
| | EPSEGSAPGTSTEPSEGSAPGTSESATPESGPGTSESATPESGPGSPAGSPT | |
| | STEEGTSESATPESGPGSEPATSGSETPGTSESATPESGPGTSTEPSEGSAP | |
| | GTSTEPSEGSAPGTSTEPSEGSAPGTSTEPSEGSAPGTSTEPSEGSAPGTST | |
| | EPSEGSAPGSPAGSPTSTEEGTSTEPSEGSAPGTSESATPESGPGSEPATS | |
| | GSETPGTSESATPESGPGSEPATSGSETPGTSESATPESGPGTSTEPSEGSA | |
| | PGTSESATPESGPGSPAGSPTSTEEGSPAGSPTSTEEGSPAGSPTSTEEGTS | |
| | ESATPESGPGTSTEPSEGSAPGTSESATPESGPGSEPATSGSETPGTSESAT | |
| | PESGPGSEPATSGSETPGTSESATPESGPGTSTEPSEGSAPGSPAGSPTSTE | |
| | EGTSESATPESGPGSEPATSGSETPGTSESATPESGPGSPAGSPTSTEEGSP | |
| | AGSPTSTEEGTSTEPSEGSAPGTSESATPESGPGTSESATPESGPGTSESA | |
| | TPESGPGSEPATSGSETPGSEPATSGSETPGSPAGSPTSTEEGTSTEPSEGS | |
| | APGTSTEPSEGSAPGSEPATSGSETPGTSES | |
| AE792A | EGSAPGTSESATPESGPGSEPATSGSETPGSEPATSGSETPGSPAGSPTST | 292 |
| | EEGTSESATPESGPGTSTEPSEGSAPGTSTEPSEGSAPGSPAGSPTSTEEG | |
| | TSTEPSEGSAPGTSTEPSEGSAPGTSESATPESGPGTSTEPSEGSAPGTSES | |
| | ATPESGPGSEPATSGSETPGTSTEPSEGSAPGTSTEPSEGSAPGTSESATPE | |
| | SGPGTSESATPESGPGSPAGSPTSTEEGTSESATPESGPGSEPATSGSETP | |
| | GTSESATPESGPGTSTEPSEGSAPGTSTEPSEGSAPGTSTEPSEGSAPGTST | |
| | EPSEGSAPGTSTEPSEGSAPGTSTEPSEGSAPGSPAGSPTSTEEGTSTEPSE | |
| | GSAPGTSESATPESGPGSEPATSGSETPGTSESATPESGPGSEPATSGSET | |
| | PGTSESATPESGPGTSTEPSEGSAPGTSESATPESGPGSPAGSPTSTEEGSP | |
| | AGSPTSTEEGSPAGSPTSTEEGTSESATPESGPGTSTEPSEGSAPGTSESA | |
| | TPESGPGSEPATSGSETPGTSESATPESGPGSEPATSGSETPGTSESATPES | |
| | GPGTSTEPSEGSAPGSPAGSPTSTEEGTSESATPESGPGSEPATSGSETPG | |
| | TSESATPESGPGSPAGSPTSTEEGSPAGSPTSTEEGTSTEPSEGSAPGTSES | |
| | ATPESGPGTSESATPESGPGTSESATPESGPGSEPATSGSETPGSEPATSG | |
| | SETPGSPAGSPTSTEEGTSTEPSEGSAPGTSTEPSEGSAPGSEPATSGSETP | |
| | GTSESATPESGPGTSTEPS | |
| AE828A | PESGPGTSTEPSEGSAPGSPAGSPTSTEEGTSTEPSEGSAPGTSTEPSEGSA | 293 |
| | PGTSESATPESGPGSEPATSGSETPGSEPATSGSETPGSPAGSPTSTEEGTS | |
| | ESATPESGPGTSTEPSEGSAPGTSTEPSEGSAPGSPAGSPTSTEEGTSTEPS | |
| | EGSAPGTSTEPSEGSAPGTSESATPESGPGTSTEPSEGSAPGTSESATPES | |
| | GPGSEPATSGSETPGTSTEPSEGSAPGTSTEPSEGSAPGTSESATPESGPG | |
| | TSESATPESGPGSPAGSPTSTEEGTSESATPESGPGSEPATSGSETPGTSES | |
| | ATPESGPGTSTEPSEGSAPGTSTEPSEGSAPGTSTEPSEGSAPGTSTEPSEG | |
| | SAPGTSTEPSEGSAPGTSTEPSEGSAPGSPAGSPTSTEEGTSTEPSEGSAP | |
| | GTSESATPESGPGSEPATSGSETPGTSESATPESGPGSEPATSGSETPGTSE | |
| | SATPESGPGTSTEPSEGSAPGTSESATPESGPGSPAGSPTSTEEGSPAGSPT | |
| | STEEGSPAGSPTSTEEGTSESATPESGPGTSTEPSEGSAPGTSESATPESGP | |
| | GSEPATSGSETPGTSESATPESGPGSEPATSGSETPGTSESATPESGPGTST | |
| | EPSEGSAPGSPAGSPTSTEEGTSESATPESGPGSEPATSGSETPGTSESATP | |
| | ESGPGSPAGSPTSTEEGSPAGSPTSTEEGTSTEPSEGSAPGTSESATPESGP | |
| | GTSESATPESGPGTSESATPESGPGSEPATSGSETPGSEPATSGSETPGSP | |
| | AGSPTSTEEGTSTEPSEGSAPGTSTEPSEGSAPGSEPATSGSETPGTSESA | |
| | T | |
| AG108A | SASTGTGPGSSPSASTGTGPGTPGSGTASSSPGSSTPSGATGSPGSSPSAS | 294 |
| | TGTGPGASPGTSSTGSPGTPGSGTASSSPGSSTPSGATGSPGTPGSGTASS | |
| | SPGASP | |
| AG108B | PGTPGSGTASSSPGSSTPSGATGSPGTPGSGTASSSPGSSTPSGATGSPGS | 295 |
| | STPSGATGSPGSSPSASTGTGPGSSPSASTGTGPGASPGTSSTGSPGTPGS | |
| | GTASSS | |
| AG144A | PGSSPSASTGTGPGSSPSASTGTGPGTPGSGTASSSPGSSTPSGATGSPGS | 296 |
| | SPSASTGTGPGASPGTSSTGSPGTPGSGTASSSPGSSTPSGATGSPGTPGS | |
| | GTASSSPGASPGTSSTGSPGASPGTSSTGSPGTPGSGTASSS | |
| AG144B | PSGATGSPGTPGSGTASSSPGSSTPSGATGSPGSSTPSGATGSPGSSPSAS | 297 |
| | TGTGPGSSPSASTGTGPGASPGTSSTGSPGTPGSGTASSSPGSSTPSGATG | |
| | SPGSSPSASTGTGPGSSPSASTGTGPGASPGTSSTGSPGASP | |
| AG180A | TSSTGSPGSSPSASTGTGPGSSPSASTGTGPGTPGSGTASSSPGSSTPSGA | 298 |
| | TGSPGSSPSASTGTGPGASPGTSSTGSPGTPGSGTASSSPGSSTPSGATGS | |
| | PGTPGSGTASSSPGASPGTSSTGSPGASPGTSSTGSPGTPGSGTASSSPGS | |
| | STPSGATGSPGASPGTSSTGSPGTPGS | |
| AG216A | TGTGPGSSPSASTGTGPGTPGSGTASSSPGSSTPSGATGSPGSSPSASTGT | 299 |
| | GPGASPGTSSTGSPGTPGSGTASSSPGSSTPSGATGSPGTPGSGTASSSPG | |
| | ASPGTSSTGSPGASPGTSSTGSPGTPGSGTASSSPGSSTPSGATGSPGASP | |
| | GTSSTGSPGTPGSGTASSSPGSSTPSGATGSPGSSPSASTGTGPGSSPSAST | |
| | GTGPGSSTPSG | |
| AG252A | TSSTGSPGSSPSASTGTGPGSSPSASTGTGPGTPGSGTASSSPGSSTPSGA | 300 |
| | TGSPGSSPSASTGTGPGASPGTSSTGSPGTPGSGTASSSPGSSTPSGATGS | |
| | PGTPGSGTASSSPGASPGTSSTGSPGASPGTSSTGSPGTPGSGTASSSPGS | |
| | STPSGATGSPGASPGTSSTGSPGTPGSGTASSSPGSSTPSGATGSPGSSPS | |
| | ASTGTGPGSSPSASTGTGPGSSTPSGATGSPGSSTPSGATGSPGASPG | |
| AG288A | TSSTGSPGSSPSASTGTGPGSSPSASTGTGPGTPGSGTASSSPGSSTPSGA | 301 |
| | TGSPGSSPSASTGTGPGASPGTSSTGSPGTPGSGTASSSPGSSTPSGATGS | |
| | PGTPGSGTASSSPGASPGTSSTGSPGASPGTSSTGSPGTPGSGTASSSPGS | |
| | STPSGATGSPGASPGTSSTGSPGTPGSGTASSSPGSSTPSGATGSPGSSPS | |
| | ASTGTGPGSSPSASTGTGPGSSTPSGATGSPGSSTPSGATGSPGASPGTSS | |
| | TGSPGASPGTSSTGSPGASPGTSSTGSPGTPGS | |
| AG324A | TSSTGSPGTPGSGTASSSPGASPGTSSTGSPGASPGTSSTGSPGASPGTSS | 302 |
| | TGSPGASPGTSSTGSPGTPGSGTASSSPGSSTPSGATGSPGTPGSGTASSS | |
| | PGSSTPSGATGSPGTPGSGTASSSPGSSTPSGATGSPGSSTPSGATGSPGS | |
| | SPSASTGTGPGSSPSASTGTGPGASPGTSSTGSPGTPGSGTASSSPGSSTPS | |
| | GATGSPGSSPSASTGTGPGSSPSASTGTGPGASPGTSSTGSPGASPGTSST | |
| | GSPGSSTPSGATGSPGSSPSASTGTGPGASPGTSSTGSPGSSPSASTGTGP | |
| | GTPGSGTASSSPGSSTP | |
| AG360A | TSSTGSPGASPGTSSTGSPGTPGSGTASSSPGASPGTSSTGSPGASPGTSS | 303 |
| | TGSPGASPGTSSTGSPGASPGTSSTGSPGTPGSGTASSSPGSSTPSGATGS | |
| | PGTPGSGTASSSPGSSTPSGATGSPGTPGSGTASSSPGSSTPSGATGSPGS | |
| | STPSGATGSPGSSPSASTGTGPGSSPSASTGTGPGASPGTSSTGSPGTPGS | |
| | GTASSSPGSSTPSGATGSPGSSPSASTGTGPGSSPSASTGTGPGASPGTSS | |
| | TGSPGASPGTSSTGSPGSSTPSGATGSPGSSPSASTGTGPGASPGTSSTGS | |
| | PGSSPSASTGTGPGTPGSGTASSSPGSSTPSGATGSPGSSTPSGATGSPGA | |
| | SPG | |
| AG396A | GATGSPGSSTPSGATGSPGSSPSASTGTGPGASPGTSSTGSPGASPGTSST | 304 |
| | GSPGTPGSGTASSSPGASPGTSSTGSPGASPGTSSTGSPGASPGTSSTGSP | |
| | GASPGTSSTGSPGTPGSGTASSSPGSSTPSGATGSPGTPGSGTASSSPGSS | |
| | TPSGATGSPGTPGSGTASSSPGSSTPSGATGSPGSSTPSGATGSPGSSPSA | |
| | STGTGPGSSPSASTGTGPGASPGTSSTGSPGTPGSGTASSSPGSSTPSGAT | |
| | GSPGSSPSASTGTGPGSSPSASTGTGPGASPGTSSTGSPGASPGTSSTGSP | |
| | GSSTPSGATGSPGSSPSASTGTGPGASPGTSSTGSPGSSPSASTGTGPGTP | |
| | GSGTASSSPGSSTPSGATGSPGSSTPSGATGSPGASPGT | |
| AG432A | GATGSPGSSTPSGATGSPGASPGTSSTGSPGTPGSGTASSSPGSSTPSGAT | 305 |
| | GSPGSSTPSGATGSPGSSTPSGATGSPGSSPSASTGTGPGASPGTSSTGSP | |
| | GASPGTSSTGSPGTPGSGTASSSPGASPGTSSTGSPGASPGTSSTGSPGAS | |
| | PGTSSTGSPGASPGTSSTGSPGTPGSGTASSSPGSSTPSGATGSPGTPGSG | |
| | TASSSPGSSTPSGATGSPGTPGSGTASSSPGSSTPSGATGSPGSSTPSGAT | |
| | GSPGSSPSASTGTGPGSSPSASTGTGPGASPGTSSTGSPGTPGSGTASSSP | |
| | GSSTPSGATGSPGSSPSASTGTGPGSSPSASTGTGPGASPGTSSTGSPGAS | |
| | PGTSSTGSPGSSTPSGATGSPGSSPSASTGTGPGASPGTSSTGSPGSSPSAS | |
| | TGTGPGTPGSGTASSSPGSSTPS | |
| AG468A | TSSTGSPGSSPSASTGTGPGTPGSGTASSSPGASPGTSSTGSPGASPGTSS | 306 |
| | TGSPGASPGTSSTGSPGSSTPSGATGSPGSSTPSGATGSPGASPGTSSTGS | |
| | PGTPGSGTASSSPGSSTPSGATGSPGSSTPSGATGSPGSSTPSGATGSPGS | |
| | SPSASTGTGPGASPGTSSTGSPGASPGTSSTGSPGTPGSGTASSSPGASPG | |
| | TSSTGSPGASPGTSSTGSPGASPGTSSTGSPGASPGTSSTGSPGTPGSGTA | |
| | SSSPGSSTPSGATGSPGTPGSGTASSSPGSSTPSGATGSPGTPGSGTASSSP | |
| | GSSTPSGATGSPGSSTPSGATGSPGSSPSASTGTGPGSSPSASTGTGPGAS | |
| | PGTSSTGSPGTPGSGTASSSPGSSTPSGATGSPGSSPSASTGTGPGSSPSAS | |
| | TGTGPGASPGTSSTGSPGASPGTSSTGSPGSSTPSGATGSPGSSPSASTGT | |
| | GPGASPG | |
| AGS04A | TSSTGSPGSSPSASTGTGPGTPGSGTASSSPGASPGTSSTGSPGASPGTSS | 307 |
| | TGSPGASPGTSSTGSPGSSTPSGATGSPGSSTPSGATGSPGASPGTSSTGS | |
| | PGTPGSGTASSSPGSSTPSGATGSPGSSTPSGATGSPGSSTPSGATGSPGS | |
| | SPSASTGTGPGASPGTSSTGSPGASPGTSSTGSPGTPGSGTASSSPGASPG | |
| | TSSTGSPGASPGTSSTGSPGASPGTSSTGSPGASPGTSSTGSPGTPGSGTA | |
| | SSSPGSSTPSGATGSPGTPGSGTASSSPGSSTPSGATGSPGTPGSGTASSSP | |
| | GSSTPSGATGSPGSSTPSGATGSPGSSPSASTGTGPGSSPSASTGTGPGAS | |
| | PGTSSTGSPGTPGSGTASSSPGSSTPSGATGSPGSSPSASTGTGPGSSPSAS | |
| | TGTGPGASPGTSSTGSPGASPGTSSTGSPGSSTPSGATGSPGSSPSASTGT | |
| | GPGASPGTSSTGSPGSSPSASTGTGPGTPGSGTASSSPGSSTP | |
| AG540A | TSSTGSPGASPGTSSTGSPGSSPSASTGTGPGTPGSGTASSSPGASPGTSS | 308 |
| | TGSPGASPGTSSTGSPGASPGTSSTGSPGSSTPSGATGSPGSSTPSGATGS | |
| | PGASPGTSSTGSPGTPGSGTASSSPGSSTPSGATGSPGSSTPSGATGSPGS | |
| | STPSGATGSPGSSPSASTGTGPGASPGTSSTGSPGASPGTSSTGSPGTPGS | |
| | GTASSSPGASPGTSSTGSPGASPGTSSTGSPGASPGTSSTGSPGASPGTSS | |
| | TGSPGTPGSGTASSSPGSSTPSGATGSPGTPGSGTASSSPGSSTPSGATGS | |
| | PGTPGSGTASSSPGSSTPSGATGSPGSSTPSGATGSPGSSPSASTGTGPGS | |
| | SPSASTGTGPGASPGTSSTGSPGTPGSGTASSSPGSSTPSGATGSPGSSPS | |
| | ASTGTGPGSSPSASTGTGPGASPGTSSTGSPGASPGTSSTGSPGSSTPSGA | |
| | TGSPGSSPSASTGTGPGASPGTSSTGSPGSSPSASTGTGPGTPGSGTASSS | |
| | PGSSTPSGATGSPGSSTPSGATGSPGASPG | |
| AG576A | TSSTGSPGTPGSGTASSSPGASPGTSSTGSPGASPGTSSTGSPGASPGTSS | 309 |
| | TGSPGSSPSASTGTGPGTPGSGTASSSPGASPGTSSTGSPGASPGTSSTGS | |
| | PGASPGTSSTGSPGSSTPSGATGSPGSSTPSGATGSPGASPGTSSTGSPGT | |
| | PGSGTASSSPGSSTPSGATGSPGSSTPSGATGSPGSSTPSGATGSPGSSPS | |
| | ASTGTGPGASPGTSSTGSPGASPGTSSTGSPGTPGSGTASSSPGASPGTSS | |
| | TGSPGASPGTSSTGSPGASPGTSSTGSPGASPGTSSTGSPGTPGSGTASSS | |
| | PGSSTPSGATGSPGTPGSGTASSSPGSSTPSGATGSPGTPGSGTASSSPGS | |
| | STPSGATGSPGSSTPSGATGSPGSSPSASTGTGPGSSPSASTGTGPGASPG | |
| | TSSTGSPGTPGSGTASSSPGSSTPSGATGSPGSSPSASTGTGPGSSPSASTG | |
| | TGPGASPGTSSTGSPGASPGTSSTGSPGSSTPSGATGSPGSSPSASTGTGP | |
| | GASPGTSSTGSPGSSPSASTGTGPGTPGSGTASSSPGSSTPSGATGSPGSS | |
| | TPSGATGSPGASPG | |
| AG612A | STGSPGTPGSGTASSSPGSSTPSGATGSPGASPGTSSTGSPGTPGSGTASS | 310 |
| | SPGSSTPSGATGSPGSSPSASTGTGPGSSPSASTGTGPGSSTPSGATGSPG | |
| | SSTPSGATGSPGASPGTSSTGSPGASPGTSSTGSPGASPGTSSTGSPGTPG | |
| | SGTASSSPGASPGTSSTGSPGASPGTSSTGSPGASPGTSSTGSPGSSPSAST | |
| | GTGPGTPGSGTASSSPGASPGTSSTGSPGASPGTSSTGSPGASPGTSSTGS | |
| | PGSSTPSGATGSPGSSTPSGATGSPGASPGTSSTGSPGTPGSGTASSSPGS | |
| | STPSGATGSPGSSTPSGATGSPGSSTPSGATGSPGSSPSASTGTGPGASPG | |
| | TSSTGSPGASPGTSSTGSPGTPGSGTASSSPGASPGTSSTGSPGASPGTSS | |
| | TGSPGASPGTSSTGSPGASPGTSSTGSPGTPGSGTASSSPGSSTPSGATGS | |
| | PGTPGSGTASSSPGSSTPSGATGSPGTPGSGTASSSPGSSTPSGATGSPGS | |
| | STPSGATGSPGSSPSASTGTGPGSSPSASTGTGPGASPGTSSTGSPGTPGS | |
| | GTASSSPGSSTPSGATGSPGSSPSASTGTGPGSSPSASTGTGPGASPGTS | |
| AG648A | GTASSSPGSSTPSGATGSPGSSPSASTGTGPGSSPSASTGTGPGSSTPSGA | 311 |
| | TGSPGSSTPSGATGSPGASPGTSSTGSPGASPGTSSTGSPGASPGTSSTGS | |
| | PGTPGSGTASSSPGASPGTSSTGSPGASPGTSSTGSPGASPGTSSTGSPGS | |
| | SPSASTGTGPGTPGSGTASSSPGASPGTSSTGSPGASPGTSSTGSPGASPG | |
| | TSSTGSPGSSTPSGATGSPGSSTPSGATGSPGASPGTSSTGSPGTPGSGTA | |
| | SSSPGSSTPSGATGSPGSSTPSGATGSPGSSTPSGATGSPGSSPSASTGTGP | |
| | GASPGTSSTGSPGASPGTSSTGSPGTPGSGTASSSPGASPGTSSTGSPGAS | |
| | PGTSSTGSPGASPGTSSTGSPGASPGTSSTGSPGTPGSGTASSSPGSSTPSG | |
| | ATGSPGTPGSGTASSSPGSSTPSGATGSPGTPGSGTASSSPGSSTPSGATG | |
| | SPGSSTPSGATGSPGSSPSASTGTGPGSSPSASTGTGPGASPGTSSTGSPG | |
| | TPGSGTASSSPGSSTPSGATGSPGSSPSASTGTGPGSSPSASTGTGPGASP | |
| | GTSSTGSPGASPGTSSTGSPGSSTPSGATGSPGSSPSASTGTGPGASPGTS | |
| | STGSPGSSPSASTGTGPGTPGSGTASSSPGSSTP | |
| AG684A | TSSTGSPGTPGSGTASSSPGSSTPSGATGSPGSSPSASTGTGPGSSPSASTG | 312 |
| | TGPGSSTPSGATGSPGSSTPSGATGSPGASPGTSSTGSPGASPGTSSTGSP | |
| | GASPGTSSTGSPGTPGSGTASSSPGASPGTSSTGSPGASPGTSSTGSPGAS | |
| | PGTSSTGSPGSSPSASTGTGPGTPGSGTASSSPGASPGTSSTGSPGASPGT | |
| | SSTGSPGASPGTSSTGSPGSSTPSGATGSPGSSTPSGATGSPGASPGTSST | |
| | GSPGTPGSGTASSSPGSSTPSGATGSPGSSTPSGATGSPGSSTPSGATGSP | |
| | GSSPSASTGTGPGASPGTSSTGSPGASPGTSSTGSPGTPGSGTASSSPGAS | |
| | PGTSSTGSPGASPGTSSTGSPGASPGTSSTGSPGASPGTSSTGSPGTPGSG | |
| | TASSSPGSSTPSGATGSPGTPGSGTASSSPGSSTPSGATGSPGTPGSGTAS | |
| | SSPGSSTPSGATGSPGSSTPSGATGSPGSSPSASTGTGPGSSPSASTGTGP | |
| | GASPGTSSTGSPGTPGSGTASSSPGSSTPSGATGSPGSSPSASTGTGPGSS | |
| | PSASTGTGPGASPGTSSTGSPGASPGTSSTGSPGSSTPSGATGSPGSSPSA | |
| | STGTGPGASPGTSSTGSPGSSPSASTGTGPGTPGSGTASSSPGSSTPSGAT | |
| | GSPGSSTPSGATGSPGASPG | |
| AG720A | TSSTGSPGTPGSGTASSSPGSSTPSGATGSPGASPGTSSTGSPGTPGSGTA | 313 |
| | SSSPGSSTPSGATGSPGSSPSASTGTGPGSSPSASTGTGPGSSTPSGATGSP | |
| | GSSTPSGATGSPGASPGTSSTGSPGASPGTSSTGSPGASPGTSSTGSPGTP | |
| | GSGTASSSPGASPGTSSTGSPGASPGTSSTGSPGASPGTSSTGSPGSSPSA | |
| | STGTGPGTPGSGTASSSPGASPGTSSTGSPGASPGTSSTGSPGASPGTSST | |
| | GSPGSSTPSGATGSPGSSTPSGATGSPGASPGTSSTGSPGTPGSGTASSSP | |
| | GSSTPSGATGSPGSSTPSGATGSPGSSTPSGATGSPGSSPSASTGTGPGAS | |
| | PGTSSTGSPGASPGTSSTGSPGTPGSGTASSSPGASPGTSSTGSPGASPGT | |
| | SSTGSPGASPGTSSTGSPGASPGTSSTGSPGTPGSGTASSSPGSSTPSGAT | |
| | GSPGTPGSGTASSSPGSSTPSGATGSPGTPGSGTASSSPGSSTPSGATGSP | |
| | GSSTPSGATGSPGSSPSASTGTGPGSSPSASTGTGPGASPGTSSTGSPGTP | |
| | GSGTASSSPGSSTPSGATGSPGSSPSASTGTGPGSSPSASTGTGPGASPGT | |
| | SSTGSPGASPGTSSTGSPGSSTPSGATGSPGSSPSASTGTGPGASPGTSST | |
| | GSPGSSPSASTGTGPGTPGSGTASSSPGSSTPSGATGSPGSSTPSGATGSP | |
| | GASPG | |
| AG756A | TSSTGSPGSSPSASTGTGPGSSPSASTGTGPGTPGSGTASSSPGSSTPSGA | 314 |
| | TGSPGSSPSASTGTGPGASPGTSSTGSPGTPGSGTASSSPGSSTPSGATGS | |
| | PGTPGSGTASSSPGASPGTSSTGSPGASPGTSSTGSPGTPGSGTASSSPGS | |
| | STPSGATGSPGASPGTSSTGSPGTPGSGTASSSPGSSTPSGATGSPGSSPS | |
| | ASTGTGPGSSPSASTGTGPGSSTPSGATGSPGSSTPSGATGSPGASPGTSS | |
| | TGSPGASPGTSSTGSPGASPGTSSTGSPGTPGSGTASSSPGASPGTSSTGS | |
| | PGASPGTSSTGSPGASPGTSSTGSPGSSPSASTGTGPGTPGSGTASSSPGA | |
| | SPGTSSTGSPGASPGTSSTGSPGASPGTSSTGSPGSSTPSGATGSPGSSTPS | |
| | GATGSPGASPGTSSTGSPGTPGSGTASSSPGSSTPSGATGSPGSSTPSGAT | |
| | GSPGSSTPSGATGSPGSSPSASTGTGPGASPGTSSTGSPGASPGTSSTGSP | |
| | GTPGSGTASSSPGASPGTSSTGSPGASPGTSSTGSPGASPGTSSTGSPGAS | |
| | PGTSSTGSPGTPGSGTASSSPGSSTPSGATGSPGTPGSGTASSSPGSSTPSG | |
| | ATGSPGTPGSGTASSSPGSSTPSGATGSPGSSTPSGATGSPGSSPSASTGT | |
| | GPGSSPSASTGTGPGASPGTSSTGSPGTPGSGTASSSPGSSTPSGATGSPG | |
| | SSPSASTGTGPGSSPSASTGTGPGASPGTSSTGSPGASPG | |
| AG792A | TSSTGSPGSSPSASTGTGPGSSPSASTGTGPGTPGSGTASSSPGSSTPSGA | 315 |
| | TGSPGSSPSASTGTGPGASPGTSSTGSPGTPGSGTASSSPGSSTPSGATGS | |
| | PGTPGSGTASSSPGASPGTSSTGSPGASPGTSSTGSPGTPGSGTASSSPGS | |
| | STPSGATGSPGASPGTSSTGSPGTPGSGTASSSPGSSTPSGATGSPGSSPS | |
| | ASTGTGPGSSPSASTGTGPGSSTPSGATGSPGSSTPSGATGSPGASPGTSS | |
| | TGSPGASPGTSSTGSPGASPGTSSTGSPGTPGSGTASSSPGASPGTSSTGS | |
| | PGASPGTSSTGSPGASPGTSSTGSPGSSPSASTGTGPGTPGSGTASSSPGA | |
| | SPGTSSTGSPGASPGTSSTGSPGASPGTSSTGSPGSSTPSGATGSPGSSTPS | |
| | GATGSPGASPGTSSTGSPGTPGSGTASSSPGSSTPSGATGSPGSSTPSGAT | |
| | GSPGSSTPSGATGSPGSSPSASTGTGPGASPGTSSTGSPGASPGTSSTGSP | |
| | GTPGSGTASSSPGASPGTSSTGSPGASPGTSSTGSPGASPGTSSTGSPGAS | |
| | PGTSSTGSPGTPGSGTASSSPGSSTPSGATGSPGTPGSGTASSSPGSSTPSG | |
| | ATGSPGTPGSGTASSSPGSSTPSGATGSPGSSTPSGATGSPGSSPSASTGT | |
| | GPGSSPSASTGTGPGASPGTSSTGSPGTPGSGTASSSPGSSTPSGATGSPG | |
| | SSPSASTGTGPGSSPSASTGTGPGASPGTSSTGSPGASPGTSSTGSPGSSTP | |
| | SGATGSPGSSPSASTGTGPGASPG | |
| AG828A | TSSTGSPGSSPSASTGTGPGSSPSASTGTGPGTPGSGTASSSPGSSTPSGA | 316 |
| | TGSPGSSPSASTGTGPGASPGTSSTGSPGTPGSGTASSSPGSSTPSGATGS | |
| | PGTPGSGTASSSPGASPGTSSTGSPGASPGTSSTGSPGTPGSGTASSSPGS | |
| | STPSGATGSPGASPGTSSTGSPGTPGSGTASSSPGSSTPSGATGSPGSSPS | |
| | ASTGTGPGSSPSASTGTGPGSSTPSGATGSPGSSTPSGATGSPGASPGTSS | |
| | TGSPGASPGTSSTGSPGASPGTSSTGSPGTPGSGTASSSPGASPGTSSTGS | |
| | PGASPGTSSTGSPGASPGTSSTGSPGSSPSASTGTGPGTPGSGTASSSPGA | |
| | SPGTSSTGSPGASPGTSSTGSPGASPGTSSTGSPGSSTPSGATGSPGSSTPS | |
| | GATGSPGASPGTSSTGSPGTPGSGTASSSPGSSTPSGATGSPGSSTPSGAT | |
| | GSPGSSTPSGATGSPGSSPSASTGTGPGASPGTSSTGSPGASPGTSSTGSP | |
| | GTPGSGTASSSPGASPGTSSTGSPGASPGTSSTGSPGASPGTSSTGSPGAS | |
| | PGTSSTGSPGTPGSGTASSSPGSSTPSGATGSPGTPGSGTASSSPGSSTPSG | |
| | ATGSPGTPGSGTASSSPGSSTPSGATGSPGSSTPSGATGSPGSSPSASTGT | |
| | GPGSSPSASTGTGPGASPGTSSTGSPGTPGSGTASSSPGSSTPSGATGSPG | |
| | SSPSASTGTGPGSSPSASTGTGPGASPGTSSTGSPGASPGTSSTGSPGSSTP | |
| | SGATGSPGSSPSASTGTGPGASPGTSSTGSPGSSPSASTGTGPGTPGSGTA | |
| | SSSPGSSTP | |
| AE869 | GSPGSPAGSPTSTEEGTSESATPESGPGTSTEPSEGSAPGSPAGSPTSTEE | 317 |
| | GTSTEPSEGSAPGTSTEPSEGSAPGTSESATPESGPGSEPATSGSETPGSEP | |
| | ATSGSETPGSPAGSPTSTEEGTSESATPESGPGTSTEPSEGSAPGTSTEPSE | |
| | GSAPGSPAGSPTSTEEGTSTEPSEGSAPGTSTEPSEGSAPGTSESATPESG | |
| | PGTSTEPSEGSAPGTSESATPESGPGSEPATSGSETPGTSTEPSEGSAPGTS | |
| | TEPSEGSAPGTSESATPESGPGTSESATPESGPGSPAGSPTSTEEGTSESAT | |
| | PESGPGSEPATSGSETPGTSESATPESGPGTSTEPSEGSAPGTSTEPSEGSA | |
| | PGTSTEPSEGSAPGTSTEPSEGSAPGTSTEPSEGSAPGTSTEPSEGSAPGSP | |
| | AGSPTSTEEGTSTEPSEGSAPGTSESATPESGPGSEPATSGSETPGTSESA | |
| | TPESGPGSEPATSGSETPGTSESATPESGPGTSTEPSEGSAPGTSESATPES | |
| | GPGSPAGSPTSTEEGSPAGSPTSTEEGSPAGSPTSTEEGTSESATPESGPG | |
| | TSTEPSEGSAPGTSESATPESGPGSEPATSGSETPGTSESATPESGPGSEPA | |
| | TSGSETPGTSESATPESGPGTSTEPSEGSAPGSPAGSPTSTEEGTSESATPE | |
| | SGPGSEPATSGSETPGTSESATPESGPGSPAGSPTSTEEGSPAGSPTSTEE | |
| | GTSTEPSEGSAPGTSESATPESGPGTSESATPESGPGTSESATPESGPGSEP | |
| | ATSGSETPGSEPATSGSETPGSPAGSPTSTEEGTSTEPSEGSAPGTSTEPSE | |
| | GSAPGSEPATSGSETPGTSESATPESGPGTSTEPSEGSAPGR | |
| AE144_R1 | SAGSPGSPAGSPTSTEEGTSESATPESGPGTSTEPSEGSAPGSPAGSPTSTE | 318 |
| | EGTSTEPSEGSAPGTSTEPSEGSAPGTSESATPESGPGSEPATSGSETPGSE | |
| | PATSGSETPGSPAGSPTSTEEGTSESATPESGPGTESASR | |
| AE288_R1 | SAGSPTGPGSEPATSGSETPGTSESATPESGPGSEPATSGSETPGTSESAT | 319 |
| | PESGPGTSTEPSEGSAPGSPAGSPTSTEEGTSESATPESGPGSEPATSGSET | |
| | PGTSESATPESGPGSPAGSPTSTEEGSPAGSPTSTEEGTSTEPSEGSAPGTS | |
| | ESATPESGPGTSESATPESGPGTSESATPESGPGSEPATSGSETPGSEPATS | |
| | GSETPGSPAGSPTSTEEGTSTEPSEGSAPGTSTEPSEGSAPGSEPATSGSET | |
| | PGTSESATPESGPGTSTEPSEGSAPSASR | |
| AE432_R1 | SAGSPGSPAGSPTSTEEGTSESATPESGPGTSTEPSEGSAPGSPAGSPTSTE | 320 |
| | EGTSTEPSEGSAPGTSTEPSEGSAPGTSESATPESGPGSEPATSGSETPGSE | |
| | PATSGSETPGSPAGSPTSTEEGTSESATPESGPGTSTEPSEGSAPGTSTEPS | |
| | EGSAPGSPAGSPTSTEEGTSTEPSEGSAPGTSTEPSEGSAPGTSESATPES | |
| | GPGTSTEPSEGSAPGTSESATPESGPGSEPATSGSETPGTSTEPSEGSAPG | |
| | TSTEPSEGSAPGTSESATPESGPGTSESATPESGPGSPAGSPTSTEEGTSES | |
| | ATPESGPGSEPATSGSETPGTSESATPESGPGTSTEPSEGSAPGTSTEPSEG | |
| | SAPGTSTEPSEGSAPGTSTEPSEGSAPGTSTEPSEGSAPGTSTEPSEGSAP | |
| | GSPAGSPTSTEEGTESASR | |
| AE576_R1 | SAGSPTEEGTSESATPESGPGSEPATSGSETPGTSESATPESGPGTSTEPSE | 321 |
| | GSAPGTSTEPSEGSAPGTSTEPSEGSAPGTSTEPSEGSAPGTSTEPSEGSA | |
| | PGTSTEPSEGSAPGSPAGSPTSTEEGTSTEPSEGSAPGTSESATPESGPGSE | |
| | PATSGSETPGTSESATPESGPGSEPATSGSETPGTSESATPESGPGTSTEPS | |
| | EGSAPGTSESATPESGPGSPAGSPTSTEEGSPAGSPTSTEEGSPAGSPTST | |
| | EEGTSESATPESGPGTSTEPSEGSAPGTSESATPESGPGSEPATSGSETPG | |
| | TSESATPESGPGSEPATSGSETPGTSESATPESGPGTSTEPSEGSAPGSPA | |
| | GSPTSTEEGTSESATPESGPGSEPATSGSETPGTSESATPESGPGSPAGSPT | |
| | STEEGSPAGSPTSTEEGTSTEPSEGSAPGTSESATPESGPGTSESATPESGP | |
| | GTSESATPESGPGSEPATSGSETPGSEPATSGSETPGSPAGSPTSTEEGTST | |
| | EPSEGSAPGTSTEPSEGSAPGSEPATSGSETPGTSESATPESGPGTSTEPSE | |
| | GSAPSASR | |
| AE864_R1 | SAGSPGSPAGSPTSTEEGTSESATPESGPGTSTEPSEGSAPGSPAGSPTSTE | 322 |
| | EGTSTEPSEGSAPGTSTEPSEGSAPGTSESATPESGPGSEPATSGSETPGSE | |
| | PATSGSETPGSPAGSPTSTEEGTSESATPESGPGTSTEPSEGSAPGTSTEPS | |
| | EGSAPGSPAGSPTSTEEGTSTEPSEGSAPGTSTEPSEGSAPGTSESATPES | |
| | GPGTSTEPSEGSAPGTSESATPESGPGSEPATSGSETPGTSTEPSEGSAPG | |
| | TSTEPSEGSAPGTSESATPESGPGTSESATPESGPGSPAGSPTSTEEGTSES | |
| | ATPESGPGSEPATSGSETPGTSESATPESGPGTSTEPSEGSAPGTSTEPSEG | |
| | SAPGTSTEPSEGSAPGTSTEPSEGSAPGTSTEPSEGSAPGTSTEPSEGSAP | |
| | GSPAGSPTSTEEGTSTEPSEGSAPGTSESATPESGPGSEPATSGSETPGTSE | |
| | SATPESGPGSEPATSGSETPGTSESATPESGPGTSTEPSEGSAPGTSESATP | |
| | ESGPGSPAGSPTSTEEGSPAGSPTSTEEGSPAGSPTSTEEGTSESATPESGP | |
| | GTSTEPSEGSAPGTSESATPESGPGSEPATSGSETPGTSESATPESGPGSEP | |
| | ATSGSETPGTSESATPESGPGTSTEPSEGSAPGSPAGSPTSTEEGTSESATP | |
| | ESGPGSEPATSGSETPGTSESATPESGPGSPAGSPTSTEEGSPAGSPTSTEE | |
| | GTSTEPSEGSAPGTSESATPESGPGTSESATPESGPGTSESATPESGPGSEP | |
| | ATSGSETPGSEPATSGSETPGSPAGSPTSTEEGTSTEPSEGSAPGTSTEPSE | |
| | GSAPGSEPATSGSETPGTSESATPESGPGTESASR | |
| AF864_R1 | SAGSPGSTSSTAESPGPGSTSSTAESPGPGSTSESPSGTAPGSTSSTAESPG | 323 |
| | PGSTSSTAESPGPGTSTPESGSASPGSTSESPSGTAPGTSPSGESSTAPGST | |
| | SESPSGTAPGSTSESPSGTAPGTSPSGESSTAPGSTSESPSGTAPGSTSESP | |
| | SGTAPGTSPSGESSTAPGSTSESPSGTAPGSTSESPSGTAPGSTSESPSGTA | |
| | PGTSTPESGSASPGSTSESPSGTAPGTSTPESGSASPGSTSSTAESPGPGST | |
| | SSTAESPGPGTSTPESGSASPGTSTPESGSASPGSTSESPSGTAPGTSTPES | |
| | GSASPGTSTPESGSASPGSTSESPSGTAPGSTSESPSGTAPGSTSESPSGTA | |
| | PGSTSSTAESPGPGTSTPESGSASPGTSTPESGSASPGSTSESPSGTAPGST | |
| | SESPSGTAPGTSTPESGSASPGSTSESPSGTAPGSTSESPSGTAPGTSTPES | |
| | GSASPGTSPSGESSTAPGSTSSTAESPGPGTSPSGESSTAPGSTSSTAESPG | |
| | PGTSTPESGSASPGSTSESPSGTAPGSTSSTAESPGPGTSTPESGSASPGTS | |
| | TPESGSASPGSTSSTAESPGPGTSPSGESSTAPGTSTPESGSASPGSTSESP | |
| | SGTAPGSTSESPSGTAPGTSTPESGSASPGTSPSGESSTAPGSTSSTAESPG | |
| | PGTSPSGESSTAPGSTSSTAESPGPGSTSSTAESPGPGTSPSGESSTAPGST | |
| | SESPSGTAPGSTSESPSGTAPGTSTPESGSASPGSTSESPSGTAPGSTSESP | |
| | SGTAPGTSTPESGSASPGSTSESPSGTAPGSTSESPSGTAPGSTSESPSGTA | |
| | PGSTSSTAESPGPGTSPSGESSTAPGTSSASR | |
| AG864_R1 | SAGSPGASPGTSSTGSPGSSPSASTGTGPGSSPSASTGTGPGTPGSGTASS | 324 |
| | SPGSSTPSGATGSPGSSPSASTGTGPGASPGTSSTGSPGTPGSGTASSSPG | |
| | SSTPSGATGSPGTPGSGTASSSPGASPGTSSTGSPGASPGTSSTGSPGTPG | |
| | SGTASSSPGSSTPSGATGSPGASPGTSSTGSPGTPGSGTASSSPGSSTPSG | |
| | ATGSPGSSPSASTGTGPGSSPSASTGTGPGSSTPSGATGSPGSSTPSGATG | |
| | SPGASPGTSSTGSPGASPGTSSTGSPGASPGTSSTGSPGTPGSGTASSSPG | |
| | ASPGTSSTGSPGASPGTSSTGSPGASPGTSSTGSPGSSPSASTGTGPGTPG | |
| | SGTASSSPGASPGTSSTGSPGASPGTSSTGSPGASPGTSSTGSPGSSTPSG | |
| | ATGSPGSSTPSGATGSPGASPGTSSTGSPGTPGSGTASSSPGSSTPSGATG | |
| | SPGSSTPSGATGSPGSSTPSGATGSPGSSPSASTGTGPGASPGTSSTGSPG | |
| | ASPGTSSTGSPGTPGSGTASSSPGASPGTSSTGSPGASPGTSSTGSPGASP | |
| | GTSSTGSPGASPGTSSTGSPGTPGSGTASSSPGSSTPSGATGSPGTPGSGT | |
| | ASSSPGSSTPSGATGSPGTPGSGTASSSPGSSTPSGATGSPGSSTPSGATG | |
| | SPGSSPSASTGTGPGSSPSASTGTGPGASPGTSSTGSPGTPGSGTASSSPG | |
| | SSTPSGATGSPGSSPSASTGTGPGSSPSASTGTGPGASPGTSSTGSPGASP | |
| | GTSSTGSPGSSTPSGATGSPGSSPSASTGTGPGASPGTSSTGSPGSSPSAST | |
| | GTGPGTPGSGTASSSPGSSTPSGATGSPGSSTPSGATGSPGASSASR | |
| AE864_R2 | GSPGAGSPAGSPTSTEEGTSESATPESGPGTSTEPSEGSAPGSPAGSPTST | 325 |
| | EEGTSTEPSEGSAPGTSTEPSEGSAPGTSESATPESGPGSEPATSGSETPGS | |
| | EPATSGSETPGSPAGSPTSTEEGTSESATPESGPGTSTEPSEGSAPGTSTEP | |
| | SEGSAPGSPAGSPTSTEEGTSTEPSEGSAPGTSTEPSEGSAPGTSESATPES | |
| | GPGTSTEPSEGSAPGTSESATPESGPGSEPATSGSETPGTSTEPSEGSAPG | |
| | TSTEPSEGSAPGTSESATPESGPGTSESATPESGPGSPAGSPTSTEEGTSES | |
| | ATPESGPGSEPATSGSETPGTSESATPESGPGTSTEPSEGSAPGTSTEPSEG | |
| | SAPGTSTEPSEGSAPGTSTEPSEGSAPGTSTEPSEGSAPGTSTEPSEGSAP | |
| | GSPAGSPTSTEEGTSTEPSEGSAPGTSESATPESGPGSEPATSGSETPGTSE | |
| | SATPESGPGSEPATSGSETPGTSESATPESGPGTSTEPSEGSAPGTSESATP | |
| | ESGPGSPAGSPTSTEEGSPAGSPTSTEEGSPAGSPTSTEEGTSESATPESGP | |
| | GTSTEPSEGSAPGTSESATPESGPGSEPATSGSETPGTSESATPESGPGSEP | |
| | ATSGSETPGTSESATPESGPGTSTEPSEGSAPGSPAGSPTSTEEGTSESATP | |
| | ESGPGSEPATSGSETPGTSESATPESGPGSPAGSPTSTEEGSPAGSPTSTEE | |
| | GTSTEPSEGSAPGTSESATPESGPGTSESATPESGPGTSESATPESGPGSEP | |
| | ATSGSETPGSEPATSGSETPGSPAGSPTSTEEGTSTEPSEGSAPGTSTEPSE | |
| | GSAPGSEPATSGSETPGTSESATPESGPGTESASR | |
| AE713 | PGSPAGSPTSTEEGTSESATPESGPGTSTEPSEGSAPGSPAGSPTSTEEGTS | 326 |
| | TEPSEGSAPGTSTEPSEGSAPGTSESATPESGPGSEPATSGSETPGSEPATS | |
| | GSETPGSPAGSPTSTEEGTSESATPESGPGTSTEPSEGSAPGTSTEPSEGSA | |
| | PGSPAGSPTSTEEGTSTEPSEGSAPGTSTEPSEGSAPGTSESATPESGPGTS | |
| | TEPSEGSAPGTSESATPESGPGSEPATSGSETPGTSTEPSEGSAPGTSTEPS | |
| | EGSAPGTSESATPESGPGTSESATPESGPGSPAGSPTSTEEGTSESATPES | |
| | GPGSEPATSGSETPGTSESATPESGPGTSTEPSEGSAPGTSTEPSEGSAPG | |
| | TSTEPSEGSAPGTSTEPSEGSAPGTSTEPSEGSAPGTSTEPSEGSAPGSPA | |
| | GSPTSTEEGTSTEPSEGSAPGTSESATPESGPGSEPATSGSETPGTSESATP | |
| | ESGPGSEPATSGSETPGTSESATPESGPGTSTEPSEGSAPGTSESATPESGP | |
| | GSPAGSPTSTEEGSPAGSPTSTEEGSPAGSPTSTEEGTSESATPESGPGTST | |
| | EPSEGSAPGTSESATPESGPGSEPATSGSETPGTSESATPESGPGSEPATS | |
| | GSETPGTSESATPESGPGTSTEPSEGSAPGSPAGSPTSTEEGTSESATPESG | |
| | PGSEPATSGSETPGTSESATPESGPGSPAGSPTSTEEGSPA | |
| AE717 | PGSPAGSPTSTEEGTSESATPESGPGTSTEPSEGSAPGSPAGSPTSTEEGTS | 327 |
| | TEPSEGSAPGTSTEPSEGSAPGTSESATPESGPGSEPATSGSETPGSEPATS | |
| | GSETPGSPAGSPTSTEEGTSESATPESGPGTSTEPSEGSAPGTSTEPSEGSA | |
| | PGSPAGSPTSTEEGTSTEPSEGSAPGTSTEPSEGSAPGTSESATPESGPGTS | |
| | TEPSEGSAPGTSESATPESGPGSEPATSGSETPGTSTEPSEGSAPGTSTEPS | |
| | EGSAPGTSESATPESGPGTSESATPESGPGSPAGSPTSTEEGTSESATPES | |
| | GPGSEPATSGSETPGTSESATPESGPGTSTEPSEGSAPGTSTEPSEGSAPG | |
| | TSTEPSEGSAPGTSTEPSEGSAPGTSTEPSEGSAPGTSTEPSEGSAPGSPA | |
| | GSPTSTEEGTSTEPSEGSAPGTSESATPESGPGSEPATSGSETPGTSESATP | |
| | ESGPGSEPATSGSETPGTSESATPESGPGTSTEPSEGSAPGTSESATPESGP | |
| | GSPAGSPTSTEEGSPAGSPTSTEEGSPAGSPTSTEEGTSESATPESGPGTST | |
| | EPSEGSAPGTSESATPESGPGSEPATSGSETPGTSESATPESGPGSEPATS | |
| | GSETPGTSESATPESGPGTSTEPSEGSAPGSPAGSPTSTEEGTSESATPESG | |
| | PGSEPATSGSETPGTSESATPESGPGSPAGSPTSTEEGSPASASR | |
| AE146 | PGSPAGSPTSTEEGTSESATPESGPGTSTEPSEGSAPGSPAGSPTSTEEGTS | 328 |
| | TEPSEGSAPGTSTEPSEGSAPGTSESATPESGPGSEPATSGSETPGSEPATS | |
| | GSETPGSPAGSPTSTEEGTSESATPESGPGTSTEPSEGSAPG | |
| AE150 | PGSPAGSPTSTEEGTSESATPESGPGTSTEPSEGSAPGSPAGSPTSTEEGTS | 329 |
| | TEPSEGSAPGTSTEPSEGSAPGTSESATPESGPGSEPATSGSETPGSEPATS | |
| | GSETPGSPAGSPTSTEEGTSESATPESGPGTSTEPSEGSAPGSASR | |
| AE818 | PGSPAGSPTSTEEGTSESATPESGPGTSTEPSEGSAPGSPAGSPTSTEEGTS | 330 |
| | TEPSEGSAPGTSTEPSEGSAPGTSESATPESGPGSEPATSGSETPGSEPATS | |
| | GSETPGSPAGSPTSTEEGTSESATPESGPGTSTEPSEGSAPGTSTEPSEGSA | |
| | PGSPAGSPTSTEEGTSTEPSEGSAPGTSTEPSEGSAPGTSESATPESGPGTS | |
| | TEPSEGSAPGTSESATPESGPGSEPATSGSETPGTSTEPSEGSAPGTSTEPS | |
| | EGSAPGTSESATPESGPGTSESATPESGPGSPAGSPTSTEEGTSESATPES | |
| | GPGSEPATSGSETPGTSESATPESGPGTSTEPSEGSAPGTSTEPSEGSAPG | |
| | TSTEPSEGSAPGTSTEPSEGSAPGTSTEPSEGSAPGTSTEPSEGSAPGSPA | |
| | GSPTSTEEGTSTEPSEGSAPGTSESATPESGPGSEPATSGSETPGTSESATP | |
| | ESGPGSEPATSGSETPGTSESATPESGPGTSTEPSEGSAPGTSESATPESGP | |
| | GSPAGSPTSTEEGSPAGSPTSTEEGSPAGSPTSTEEGTSESATPESGPGTST | |
| | EPSEGSAPGTSESATPESGPGSEPATSGSETPGTSESATPESGPGSEPATS | |
| | GSETPGTSESATPESGPGTSTEPSEGSAPGSPAGSPTSTEEGTSESATPESG | |
| | PGSEPATSGSETPGTSESATPESGPGSPAGSPTSTEEGSPAGSPTSTEEGTS | |
| | TEPSEGSAPGTSESATPESGPGTSESATPESGPGTSESATPESGPGSEPATS | |
| | GSETPGSEPATSGSETPGSPAGSPTSTEEGTSTEPSEGSAPG | |
| AE822 | PGSPAGSPTSTEEGTSESATPESGPGTSTEPSEGSAPGSPAGSPTSTEEGTS | 331 |
| | TEPSEGSAPGTSTEPSEGSAPGTSESATPESGPGSEPATSGSETPGSEPATS | |
| | GSETPGSPAGSPTSTEEGTSESATPESGPGTSTEPSEGSAPGTSTEPSEGSA | |
| | PGSPAGSPTSTEEGTSTEPSEGSAPGTSTEPSEGSAPGTSESATPESGPGTS | |
| | TEPSEGSAPGTSESATPESGPGSEPATSGSETPGTSTEPSEGSAPGTSTEPS | |
| | EGSAPGTSESATPESGPGTSESATPESGPGSPAGSPTSTEEGTSESATPES | |
| | GPGSEPATSGSETPGTSESATPESGPGTSTEPSEGSAPGTSTEPSEGSAPG | |
| | TSTEPSEGSAPGTSTEPSEGSAPGTSTEPSEGSAPGTSTEPSEGSAPGSPA | |
| | GSPTSTEEGTSTEPSEGSAPGTSESATPESGPGSEPATSGSETPGTSESATP | |
| | ESGPGSEPATSGSETPGTSESATPESGPGTSTEPSEGSAPGTSESATPESGP | |
| | GSPAGSPTSTEEGSPAGSPTSTEEGSPAGSPTSTEEGTSESATPESGPGTST | |
| | EPSEGSAPGTSESATPESGPGSEPATSGSETPGTSESATPESGPGSEPATS | |
| | GSETPGTSESATPESGPGTSTEPSEGSAPGSPAGSPTSTEEGTSESATPESG | |
| | PGSEPATSGSETPGTSESATPESGPGSPAGSPTSTEEGSPAGSPTSTEEGTS | |
| | TEPSEGSAPGTSESATPESGPGTSESATPESGPGTSESATPESGPGSEPATS | |
| | GSETPGSEPATSGSETPGSPAGSPTSTEEGTSTEPSEGSAPGSASR | |
| AE626 | PGSPAGSPTSTEEGTSESATPESGPGTSTEPSEGSAPGSPAGSPTSTEEGTS | 332 |
| | TEPSEGSAPGTSTEPSEGSAPGTSESATPESGPGSEPATSGSETPGSEPATS | |
| | GSETPGSPAGSPTSTEEGTSESATPESGPGTSTEPSEGSAPGTSTEPSEGSA | |
| | PGSPAGSPTSTEEGTSTEPSEGSAPGTSTEPSEGSAPGTSESATPESGPGTS | |
| | TEPSEGSAPGTSESATPESGPGSEPATSGSETPGTSTEPSEGSAPGTSTEPS | |
| | EGSAPGTSESATPESGPGTSESATPESGPGSPAGSPTSTEEGTSESATPES | |
| | GPGSEPATSGSETPGTSESATPESGPGTSTEPSEGSAPGTSTEPSEGSAPG | |
| | TSTEPSEGSAPGTSTEPSEGSAPGTSTEPSEGSAPGTSTEPSEGSAPGSPA | |
| | GSPTSTEEGTSTEPSEGSAPGTSESATPESGPGSEPATSGSETPGTSESATP | |
| | ESGPGSEPATSGSETPGTSESATPESGPGTSTEPSEGSAPGTSESATPESGP | |
| | GSPAGSPTSTEEGSPAGSPTSTEEGSPAGSPTSTEEGTSESATPESGPGTST | |
| | EPSEGSAPGTSESATPESGPGSEPATSGSETPGTSESATPESGPGSEPATS | |
| | GSETPG | |
| AE630 | PGSPAGSPTSTEEGTSESATPESGPGTSTEPSEGSAPGSPAGSPTSTEEGTS | 333 |
| | TEPSEGSAPGTSTEPSEGSAPGTSESATPESGPGSEPATSGSETPGSEPATS | |
| | GSETPGSPAGSPTSTEEGTSESATPESGPGTSTEPSEGSAPGTSTEPSEGSA | |
| | PGSPAGSPTSTEEGTSTEPSEGSAPGTSTEPSEGSAPGTSESATPESGPGTS | |
| | TEPSEGSAPGTSESATPESGPGSEPATSGSETPGTSTEPSEGSAPGTSTEPS | |
| | EGSAPGTSESATPESGPGTSESATPESGPGSPAGSPTSTEEGTSESATPES | |
| | GPGSEPATSGSETPGTSESATPESGPGTSTEPSEGSAPGTSTEPSEGSAPG | |
| | TSTEPSEGSAPGTSTEPSEGSAPGTSTEPSEGSAPGTSTEPSEGSAPGSPA | |
| | GSPTSTEEGTSTEPSEGSAPGTSESATPESGPGSEPATSGSETPGTSESATP | |
| | ESGPGSEPATSGSETPGTSESATPESGPGTSTEPSEGSAPGTSESATPESGP | |
| | GSPAGSPTSTEEGSPAGSPTSTEEGSPAGSPTSTEEGTSESATPESGPGTST | |
| | EPSEGSAPGTSESATPESGPGSEPATSGSETPGTSESATPESGPGSEPATS | |
| | GSETPGSASR | |
| AE1298 | PGSPAGSPTSTEEGTSESATPESGPGTSTEPSEGSAPGSPAGSPTSTEEGTS | 334 |
| | TEPSEGSAPGTSTEPSEGSAPGTSESATPESGPGSEPATSGSETPGSEPATS | |
| | GSETPGSPAGSPTSTEEGTSESATPESGPGTSTEPSEGSAPGTSTEPSEGSA | |
| | PGSPAGSPTSTEEGTSTEPSEGSAPGTSTEPSEGSAPGTSESATPESGPGTS | |
| | TEPSEGSAPGTSESATPESGPGSEPATSGSETPGTSTEPSEGSAPGTSTEPS | |
| | EGSAPGTSESATPESGPGTSESATPESGPGSPAGSPTSTEEGTSESATPES | |
| | GPGSEPATSGSETPGTSESATPESGPGTSTEPSEGSAPGTSTEPSEGSAPG | |
| | TSTEPSEGSAPGTSTEPSEGSAPGTSTEPSEGSAPGTSTEPSEGSAPGSPA | |
| | GSPTSTEEGTSTEPSEGSAPGTSESATPESGPGSEPATSGSETPGTSESATP | |
| | ESGPGSEPATSGSETPGTSESATPESGPGTSTEPSEGSAPGTSESATPESGP | |
| | GSPAGSPTSTEEGSPAGSPTSTEEGSPAGSPTSTEEGTSESATPESGPGTST | |
| | EPSEGSAPGTSESATPESGPGSEPATSGSETPGTSESATPESGPGSEPATS | |
| | GSETPGTSESATPESGPGTSTEPSEGSAPGSPAGSPTSTEEGTSESATPESG | |
| | PGSEPATSGSETPGTSESATPESGPGSPAGSPTSTEEGSPAGSPTSTEEGTS | |
| | TEPSEGSAPGTSESATPESGPGTSESATPESGPGTSESATPESGPGSEPATS | |
| | GSETPGSEPATSGSETPGSPAGSPTSTEEGTSTEPSEGSAPGTSTEPSEGSA | |
| | PGSEPATSGSETPGTSESATPESGPGTSTEPSEGSAPGSPAGSPTSTEEGTS | |
| | ESATPESGPGTSTEPSEGSAPGSPAGSPTSTEEGTSTEPSEGSAPGTSTEPS | |
| | EGSAPGTSESATPESGPGSEPATSGSETPGSEPATSGSETPGSPAGSPTST | |
| | EEGTSESATPESGPGTSTEPSEGSAPGTSTEPSEGSAPGSPAGSPTSTEEG | |
| | TSTEPSEGSAPGTSTEPSEGSAPGTSESATPESGPGTSTEPSEGSAPGTSES | |
| | ATPESGPGSEPATSGSETPGTSTEPSEGSAPGTSTEPSEGSAPGTSESATPE | |
| | SGPGTSESATPESGPGSPAGSPTSTEEGTSESATPESGPGSEPATSGSETP | |
| | GTSESATPESGPGTSTEPSEGSAPGTSTEPSEGSAPGTSTEPSEGSAPGTST | |
| | EPSEGSAPGTSTEPSEGSAPGTSTEPSEGSAPGSPAGSPTSTEEGTSTEPSE | |
| | GSAPG | |
| AE1302 | PGSPAGSPTSTEEGTSESATPESGPGTSTEPSEGSAPGSPAGSPTSTEEGTS | 335 |
| | TEPSEGSAPGTSTEPSEGSAPGTSESATPESGPGSEPATSGSETPGSEPATS | |
| | GSETPGSPAGSPTSTEEGTSESATPESGPGTSTEPSEGSAPGTSTEPSEGSA | |
| | PGSPAGSPTSTEEGTSTEPSEGSAPGTSTEPSEGSAPGTSESATPESGPGTS | |
| | TEPSEGSAPGTSESATPESGPGSEPATSGSETPGTSTEPSEGSAPGTSTEPS | |
| | EGSAPGTSESATPESGPGTSESATPESGPGSPAGSPTSTEEGTSESATPES | |
| | GPGSEPATSGSETPGTSESATPESGPGTSTEPSEGSAPGTSTEPSEGSAPG | |
| | TSTEPSEGSAPGTSTEPSEGSAPGTSTEPSEGSAPGTSTEPSEGSAPGSPA | |
| | GSPTSTEEGTSTEPSEGSAPGTSESATPESGPGSEPATSGSETPGTSESATP | |
| | ESGPGSEPATSGSETPGTSESATPESGPGTSTEPSEGSAPGTSESATPESGP | |
| | GSPAGSPTSTEEGSPAGSPTSTEEGSPAGSPTSTEEGTSESATPESGPGTST | |
| | EPSEGSAPGTSESATPESGPGSEPATSGSETPGTSESATPESGPGSEPATS | |
| | GSETPGTSESATPESGPGTSTEPSEGSAPGSPAGSPTSTEEGTSESATPESG | |
| | PGSEPATSGSETPGTSESATPESGPGSPAGSPTSTEEGSPAGSPTSTEEGTS | |
| | TEPSEGSAPGTSESATPESGPGTSESATPESGPGTSESATPESGPGSEPATS | |
| | GSETPGSEPATSGSETPGSPAGSPTSTEEGTSTEPSEGSAPGTSTEPSEGSA | |
| | PGSEPATSGSETPGTSESATPESGPGTSTEPSEGSAPGSPAGSPTSTEEGTS | |
| | ESATPESGPGTSTEPSEGSAPGSPAGSPTSTEEGTSTEPSEGSAPGTSTEPS | |
| | EGSAPGTSESATPESGPGSEPATSGSETPGSEPATSGSETPGSPAGSPTST | |
| | EEGTSESATPESGPGTSTEPSEGSAPGTSTEPSEGSAPGSPAGSPTSTEEG | |
| | TSTEPSEGSAPGTSTEPSEGSAPGTSESATPESGPGTSTEPSEGSAPGTSES | |
| | ATPESGPGSEPATSGSETPGTSTEPSEGSAPGTSTEPSEGSAPGTSESATPE | |
| | SGPGTSESATPESGPGSPAGSPTSTEEGTSESATPESGPGSEPATSGSETP | |
| | GTSESATPESGPGTSTEPSEGSAPGTSTEPSEGSAPGTSTEPSEGSAPGTST | |
| | EPSEGSAPGTSTEPSEGSAPGTSTEPSEGSAPGSPAGSPTSTEEGTSTEPSE | |
| | GSAPGSASR | |
| AF713 | GSTSSTAESPGPGSTSSTAESPGPGSTSESPSGTAPGSTSSTAESPGPGSTS | 336 |
| | STAESPGPGTSTPESGSASPGSTSESPSGTAPGTSPSGESSTAPGSTSESPS | |
| | GTAPGSTSESPSGTAPGTSPSGESSTAPGSTSESPSGTAPGSTSESPSGTAP | |
| | GTSPSGESSTAPGSTSESPSGTAPGSTSESPSGTAPGSTSESPSGTAPGTST | |
| | PESGSASPGSTSESPSGTAPGTSTPESGSASPGSTSSTAESPGPGSTSSTAE | |
| | SPGPGTSTPESGSASPGTSTPESGSASPGSTSESPSGTAPGTSTPESGSASP | |
| | GTSTPESGSASPGSTSESPSGTAPGSTSESPSGTAPGSTSESPSGTAPGSTS | |
| | STAESPGPGTSTPESGSASPGTSTPESGSASPGSTSESPSGTAPGSTSESPS | |
| | GTAPGTSTPESGSASPGSTSESPSGTAPGSTSESPSGTAPGTSTPESGSASP | |
| | GTSPSGESSTAPGSTSSTAESPGPGTSPSGESSTAPGSTSSTAESPGPGTST | |
| | PESGSASPGSTSESPSGTAPGSTSSTAESPGPGTSTPESGSASPGTSTPESG | |
| | SASPGSTSSTAESPGPGTSPSGESSTAPGTSTPESGSASPGSTSESPSGTAP | |
| | GSTSESPSGTAPGTSTPESGSASPGTSPSGESSTAPGSTSSTAESPGPGTSP | |
| | SGESSTAPGSTSSTAESPGPGSTSSTAESPGPGTSPS | |
| AF717 | GSTSSTAESPGPGSTSSTAESPGPGSTSESPSGTAPGSTSSTAESPGPGSTS | 337 |
| | STAESPGPGTSTPESGSASPGSTSESPSGTAPGTSPSGESSTAPGSTSESPS | |
| | GTAPGSTSESPSGTAPGTSPSGESSTAPGSTSESPSGTAPGSTSESPSGTAP | |
| | GTSPSGESSTAPGSTSESPSGTAPGSTSESPSGTAPGSTSESPSGTAPGTST | |
| | PESGSASPGSTSESPSGTAPGTSTPESGSASPGSTSSTAESPGPGSTSSTAE | |
| | SPGPGTSTPESGSASPGTSTPESGSASPGSTSESPSGTAPGTSTPESGSASP | |
| | GTSTPESGSASPGSTSESPSGTAPGSTSESPSGTAPGSTSESPSGTAPGSTS | |
| | STAESPGPGTSTPESGSASPGTSTPESGSASPGSTSESPSGTAPGSTSESPS | |
| | GTAPGTSTPESGSASPGSTSESPSGTAPGSTSESPSGTAPGTSTPESGSASP | |
| | GTSPSGESSTAPGSTSSTAESPGPGTSPSGESSTAPGSTSSTAESPGPGTST | |
| | PESGSASPGSTSESPSGTAPGSTSSTAESPGPGTSTPESGSASPGTSTPESG | |
| | SASPGSTSSTAESPGPGTSPSGESSTAPGTSTPESGSASPGSTSESPSGTAP | |
| | GSTSESPSGTAPGTSTPESGSASPGTSPSGESSTAPGSTSSTAESPGPGTSP | |
| | SGESSTAPGSTSSTAESPGPGSTSSTAESPGPGTSPSSASR | |
| AG713 | GASPGTSSTGSPGSSPSASTGTGPGSSPSASTGTGPGTPGSGTASSSPGSS | 338 |
| | TPSGATGSPGSSPSASTGTGPGASPGTSSTGSPGTPGSGTASSSPGSSTPS | |
| | GATGSPGTPGSGTASSSPGASPGTSSTGSPGASPGTSSTGSPGTPGSGTAS | |
| | SSPGSSTPSGATGSPGASPGTSSTGSPGTPGSGTASSSPGSSTPSGATGSP | |
| | GSSPSASTGTGPGSSPSASTGTGPGSSTPSGATGSPGSSTPSGATGSPGAS | |
| | PGTSSTGSPGASPGTSSTGSPGASPGTSSTGSPGTPGSGTASSSPGASPGT | |
| | SSTGSPGASPGTSSTGSPGASPGTSSTGSPGSSPSASTGTGPGTPGSGTAS | |
| | SSPGASPGTSSTGSPGASPGTSSTGSPGASPGTSSTGSPGSSTPSGATGSP | |
| | GSSTPSGATGSPGASPGTSSTGSPGTPGSGTASSSPGSSTPSGATGSPGSS | |
| | TPSGATGSPGSSTPSGATGSPGSSPSASTGTGPGASPGTSSTGSPGASPGT | |
| | SSTGSPGTPGSGTASSSPGASPGTSSTGSPGASPGTSSTGSPGASPGTSST | |
| | GSPGASPGTSSTGSPGTPGSGTASSSPGSSTPSGATGSPGTPGSGTASSSP | |
| | GSSTPSGATGSPGTPGSGTASSSPGSSTPSGATGSPGSSTPSGATGSPGSS | |
| | PSASTGTGPGSSPSASTGTGPGASPGTSSTGSPGTPGSGTASSSPGSSTP | |
| AG717 | GASPGTSSTGSPGSSPSASTGTGPGSSPSASTGTGPGTPGSGTASSSPGSS | 339 |
| | TPSGATGSPGSSPSASTGTGPGASPGTSSTGSPGTPGSGTASSSPGSSTPS | |
| | GATGSPGTPGSGTASSSPGASPGTSSTGSPGASPGTSSTGSPGTPGSGTAS | |
| | SSPGSSTPSGATGSPGASPGTSSTGSPGTPGSGTASSSPGSSTPSGATGSP | |
| | GSSPSASTGTGPGSSPSASTGTGPGSSTPSGATGSPGSSTPSGATGSPGAS | |
| | PGTSSTGSPGASPGTSSTGSPGASPGTSSTGSPGTPGSGTASSSPGASPGT | |
| | SSTGSPGASPGTSSTGSPGASPGTSSTGSPGSSPSASTGTGPGTPGSGTAS | |
| | SSPGASPGTSSTGSPGASPGTSSTGSPGASPGTSSTGSPGSSTPSGATGSP | |
| | GSSTPSGATGSPGASPGTSSTGSPGTPGSGTASSSPGSSTPSGATGSPGSS | |
| | TPSGATGSPGSSTPSGATGSPGSSPSASTGTGPGASPGTSSTGSPGASPGT | |
| | SSTGSPGTPGSGTASSSPGASPGTSSTGSPGASPGTSSTGSPGASPGTSST | |
| | GSPGASPGTSSTGSPGTPGSGTASSSPGSSTPSGATGSPGTPGSGTASSSP | |
| | GSSTPSGATGSPGTPGSGTASSSPGSSTPSGATGSPGSSTPSGATGSPGSS | |
| | PSASTGTGPGSSPSASTGTGPGASPGTSSTGSPGTPGSGTASSSPGSSTPS | |
| | ASR | |

[0259] In some embodiments wherein the XTEN has less than 100% of its amino acids consisting of 4, 5, or 6 types of amino acid selected from glycine (G), alanine (A), serine (S), threonine (T), glutamate (E) and proline (P), or less than 100% of the sequence consisting of the sequence motifs from Table 9 or the XTEN sequences of Table 10 and Table 11, the other amino acid residues of the XTEN are selected from any of the other 14 natural L-amino acids, but are preferentially selected from hydrophilic amino acids such that the XTEN sequence contains at least about 90%, 91%, 92%, 93%, 94%, 95%, 96%, 97%, 98%, or at least about 99% hydrophilic amino acids. An individual amino acid or a short sequence of amino acids other than glycine (G), alanine (A), serine (S), threonine (T), glutamate (E) and proline (P) may be incorporated into the XTEN to achieve a needed property, such as to permit incorporation of a restriction site by the encoding nucleotides, or to facilitate linking to a payload component by inclusion of cysteine or lysine amino acids, or incorporation of a cleavage sequence. As one exemplary embodiment, described more fully below, the XTEN incorporates from 1 to about 20, or 1 to about 15, or 1 to about 10, or 1 to about 5, or 9, or 3, or 2 cysteine residues, or a single cysteine residue wherein the reactive cysteines are utilized for linking to cross-linkers or targeting moieties or other XTEN, as described herein. In these embodiments, the incorporation of the lysine and/or cysteine residues does not otherwise affect the underlying properties of the XTEN, described herein. Specific embodiments of the foregoing XTEN with lysine and/or cyteine residues are set forth in Table 11. The XTEN amino acids that are not glycine (G), alanine (A), serine (S), threonine (T), glutamate (E) and proline (P) are either interspersed throughout the XTEN sequence, are located within or between the sequence motifs, or are concentrated in one or more short stretches of the XTEN sequence such as at or near the N- or C-terminus. As hydrophobic amino acids impart structure to a polypeptide, the invention provides that the content of hydrophobic amino acids in the XTEN utilized in the conjugation constructs will typically be less than 5%, or less than 2%, or less than 1% of the total amino acids incorporated into the XTEN. Hydrophobic residues that are less favored in construction of XTEN include tryptophan, phenylalanine, tyrosine, leucine, isoleucine, valine, and methionine. Additionally, one can design the XTEN sequences to contain less than 5% or less than 4% or less than 3% or less than 2% or less than 1% or none of the following amino acids: methionine (to avoid oxidation), asparagine and glutamine (to avoid desamidation). In other embodiments, the amino acid content of methionine and tryptophan in the XTEN component used in the conjugation constructs is typically less than 5%, or less than 2%, and most preferably less than 1%. In other embodiments, the XTEN of the subject XTEN conjugates will have a sequence that has less than 10% amino acid residues with a positive charge, or less than about 7%, or less that about 5%, or less than about 2% amino acid residues with a positive charge, the sum of methionine and tryptophan residues will be less than 2%, and the sum of asparagine and glutamine residues will be less than 5% of the total XTEN sequence.

### 3. Cysteine- and Lysine-Engineered XTEN Sequences

[0260] In another aspect, the invention provides XTEN for incorporation into the subject composition that have defined numbers of incorporated cysteine or lysine residues; “cysteine-engineered XTEN” and “lysine-engineered XTEN”, respectively. It is an object of the invention to provide XTEN with defned numbers of cysteine and/or lysine residues to permit conjugation between the thiol group of the cysteine or the epsilon amino group of the lysine and a reactive group on a payload, targeting moiety, or a cross-linker to be conjugated to the engineered XTEN. In one embodiment of the foregoing, the lysine-engineered XTEN of the invention has a single lysine residue, preferentially located at or near the C-terminus of the XTEN. In another embodiment of the foregoing, the cysteine-engineered XTEN of the invention has between 1 to about 20 cysteine residues, or about 1 to about 10 cysteine residues, or about 1 to about 5 cysteine residues, or 1 to about 3 cysteine residues, or 9 cysteine residues, or 3 cysteine residues, or 2 cysteine residues, or alternatively only a single cysteine residue. Using the foregoing lysine- and/or cysteine-containing XTEN embodiments, conjugates can be constructed that comprise a payload, a targeting moiety, one or more XTEN (which may have a linked cross-linker or payload or targeting moiety) used to create the subject targeted conjugate compositions that are useful in the treatment of a disease in a subject. In one embodiment, the cysteine-engineered XTEN would serve as a backbone carrier to which individual targeted conjugate fusion proteins could be linked using PCM such that the linked individual targeted conjugate fusion proteins would be released when in proximity to a target tissue colocalized with a protease capable of cleaving the PCM. In another embodiment, the cysteine-engineered XTEN are used to make configurations bearing 2, 3, 4 or more XTEN linked to a common cross-linker resulting in multivalent constructs in order to increase the overall molecular weight and size of the targeted conjugate compositions. It will be understood that in the subject targeted conjugate compostions, the maximum number of molecules of the payload, targeting moiety or another XTEN linked to the engineered XTEN component is determined by the numbers of lysines, cysteines or other amino acids with a reactive side group (e.g., a terminal amino or thiol) incorporated into the XTEN.

[0261] In one embodiment, the invention provides cysteine-engineered XTEN where nucleotides encoding one or more amino acids of an XTEN (e.g., the XTEN of Table 10) are replaced with a cysteine amino acid to create the cysteine-engineered XTEN gene. In another embodiment, the invention provides cysteine-engineered XTEN where nucleotides encoding one or more cysteine amino acids are inserted into an-XTEN encoding gene to create the cysteine-engineered XTEN gene. In other cases, oligonucleotides encoding one or more motifs of about 9 to about 14 amino acids comprising codons encoding one or more cysteines are linked in frame with other oligos encoding XTEN motifs or full-length XTEN to create the cysteine-engineered XTEN gene. In one embodiment of the foregoing, where the one or more cysteines are inserted into an XTEN sequence during the creation of the XTEN gene, nucleotides encoding cysteine can be linked to codons encoding amino acids used in XTEN to create a cysteine-XTEN motif with the cysteine(s) at a defined position using the methods described herein, or by standard molecular biology techniques, and the motifs subsequently assembled into the gene encoding the full-length cysteine-engineered XTEN. In such cases, where, for example, nucleotides encoding a single cysteine are added to the DNA encoding a motif selected from Table 9, the resulting motif would have 13 amino acids, while incorporating two cysteines would result in a motif having 14 amino acids, etc. In other cases, a cysteine-motif can be created de novo and be of a pre-defined length and number of cysteine amino acids by linking nucleotides encoding cysteine to nucleotides encoding one or more amino acid residues used in XTEN (e.g., G, S, T, E, P, A) at a defined position, and the encoding motifs subsequently assembled by annealing with other XTEN-encoding motif sequences into the gene encoding the full-length XTEN, as described herein. In cases where a lysine-engineered XTEN is utilized to make the conjugates of the invention, the approaches described above would be performed with codons encoding lysine instead of cysteine. Thus, by the foregoing, a new XTEN motif can be created that could comprise about 9-14 amino acid residues and have one or more reactive amino acids; i.e., cysteine or lysine. Non-limiting examples of motifs suitable for use in an engineered XTEN that contain a single cysteine or lysine are:

(SEQ ID NO: 340)
GGSPAGSCTSP
(SEQ ID NO: 341)
GASASCAPSTG
(SEQ ID NO: 342)
TAEAAGCGTAEAA
(SEQ ID NO: 343)
GPEPTCPAPSG
(SEQ ID NO: 344)
GGSPAGSKTSP
(SEQ ID NO: 345)
GASASKAPSTG

However, the invention contemplates motifs of different lengths for incorporation into XTEN.

[0262] In one embodiment, the disclosure provides XTEN sequences with a single C-terminal lysine for linking to a payload, targeting moiety, or another XTEN. In another embodiment, the disclosure provides XTEN with 1 to 9 residues of cysteine wherein the sequences with multiple cyteine are interspersed across the length of the XTEN. In such cases where a gene encoding an XTEN with one or more cysteine or lysine residues is to be constructed from existing XTEN motifs or segments, the gene can be designed and built by linking existing “building block” polynucleotides encoding both short- and long-length XTENs; e.g., AE36, AE48, AE144, AE288, AE432, AE576, AE864, AM48, AM875, AE912, AG864, which can be fused in frame with the nucleotides encoding the cysteine- and/or lysine-containing motifs or, alternatively, the cysteine- and/or lysine-encoding nucelotides can be PCR'ed into an existing gene encoding an XTEN sequence using conventional PCR methods, or as described herein. For example, where an existing full-length XTEN gene is to be modified with nucleotides encoding one or more reactive cysteine or lysine residues, an oligonucleotide can be created that encodes a cysteine or lysine and that exhibits partial homology to and can hybridize with one or more short sequences of the XTEN, resulting in a recombination event and substitution of a cysteine or the lysine codon for an existing codon of the XTEN gene.The cysteine- or lysine-encoding oligonucleotides can be designed to hybridize with a given sequence segment at different points along the known XTEN sequence to permit their insertion into an XTEN-encoding gene. Thus, the invention contemplates that multiple XTEN gene constructs can be created with cysteines or lysines inserted at different locations within the XTEN sequence by the selection of restriction sites within the XTEN sequence and the design of oligonucleotides appropriate for the given location and that encode a cysteine or lysine, including use of designed oligonucleotides that result in multiple insertions in the same XTEN sequence. By the design and selection of one or more such oligonucleotides in consideration of the known sequence of the XTEN, and the appropriate use of the methods of the invention, the potential number of substituted reactive cysteine or lysine residues inserted into the full-length XTEN can be estimated and then confirmed by sequencing the resulting XTEN gene.

[0263] Non-limiting examples of cysteine- and lysine- engineered XTEN are provided in Table 11. Thus, in one embodiment, the invention provides an XTEN sequence having at least about 80% sequence identity, or at least about 90%, or about 91%, or about 92%, or about 93%, or about 94%, or about 95%, or about 96%, or about 97%, or about 98%, or about 99% sequence identity, or is identical to a sequence or a fragment of a sequence selected from of Table 11, when optimally aligned. However, application of the cysteine- or lysine-engineered methodology to create XTEN encompassing cysteine or lysine residues is not meant to be constrained to the precise compositions or range of composition identities of the foregoing embodiments. As will be appreciated by those skilled in the art, the precise location and numbers of incorporated cysteine or lysine residues in an XTEN can be varied without departing from the invention as described.

TABLE 11
Cysteine- and lysine-engineered XTEN

| | | SEQ |
|---|---|---|
| | | ID |
| Name | Ammo Acid Sequence | NO: |
| Seg | SAGSPTAEAAGCGTAEAAGSPAGSPTSTEEGTSESATPESGPGTSTEPSEGSAPG | 346 |
| 174 | SPAGSPTSTEEGTSTEPSEGSAPGTSTEPSEGSAPGTSESATPESGPGSEPATSGS | |
| | ETPGSEPATSGSETPGSPAGSPTSTEEGTSESATPESGPGTSTEPSEGSAPGTSTEP | |
| | SEGSAPGSPAGSPTSTEEGTSTEPSEGSAPGTSTEPSEGSAPGTSESATPESGPGT | |
| | STEPSEGSAPGTSESATPESGPGSEPATSGSETPGTSTEPSEGSAPGTSTEPSEGS | |
| | APGTSESATPESGPGTSESATPESGPGSPAGSPTSTEEGTSESATPESGPGSEPAT | |
| | SGSETPGTSESATPESGPGTSTEPSEGSAPGTSTEPSEGSAPGTSTEPSEGSAPGT | |
| | STEPSEGSAPGTSTEPSEGSAPGTSTEPSEGSAPGSPAGSPTSTEEGTSTEPSEGS | |
| | APTAEAAGCGTAEAAGTSESATPESGPGSEPATSGSETPGTSESATPESGPGSEP | |
| | ATSGSETPGTSESATPESGPGTSTEPSEGSAPGTSESATPESGPGSPAGSPTSTEE | |
| | GSPAGSPTSTEEGSPAGSPTSTEEGTSESATPESGPGTSTEPSEGSAPGTSESATP | |
| | ESGPGSEPATSGSETPGTSESATPESGPGSEPATSGSETPGTSESATPESGPGTST | |
| | EPSEGSAPGSPAGSPTSTEEGTSESATPESGPGSEPATSGSETPGTSESATPESGP | |
| | GSPAGSPTSTEEGSPAGSPTSTEEGTSTEPSEGSAPGTSESATPESGPGTSESATP | |
| | ESGPGTSESATPESGPGSEPATSGSETPGSEPATSGSETPGSPAGSPTSTEEGTST | |
| | EPSEGSAPGTSTEPSEGSAPGSEPATSGSETPGTSESATPESGPGTSTEPSEGSAP | |
| | TAEAAGCGTAEAASASR | |
| Seg | SAGSPGSPAGSPTSTEEGTSESATPESGPGTSTEPSEGSAPGSPAGSPTSTEEGTS | 347 |
| 175 | TEPSEGSAPGTSTEPSEGSAPGTSESATPESGPGSEPATSGSETPGSEPATSGSET | |
| | PGSPAGSPTSTEEGTSESATPESGPGTSTEPSEGSAPGTSTEPSEGSAPGSPAGSP | |
| | TSTEEGTSTEPSEGSAPGTSTEPSEGSAPGTSESATPESGPGTSTEPSEGSAPGTS | |
| | ESATPESGPGSEPATSGSETPGTSTEPSEGSAPGTSTEPSEGSAPGTSESATPESG | |
| | PGTSESATPESGPGSPAGSPTSTEEGTSESATPESGPGSEPATSGSETPGTSESAT | |
| | PESGPGTSTEPSEGSAPGTSTEPSEGSAPGTSTEPSEGSAPGTSTEPSEGSAPGTS | |
| | TEPSEGSAPGTSTEPSEGSAPGSPAGSPTSTEEGTSTEPSEGSAPTAEAAGCGTA | |
| | EAAPGSEPATSGSETPGTSESATPESGPGSEPATSGSETPGTAEAAGCGTAEAAS | |
| | TEPSEGSAPGTSESATPESGPGSPAGSPTSTEEGSPATAEAAGCGTAEAASPTST | |
| | EEGTSESATPESGPGTSTEPSEGSAPGTSESATTAEAAGCGTAEAASETPGTSES | |
| | ATPESGPGSEPATSGSETPGTSESATPESGTAEAAGCGTAEAAGSPAGSPTSTEE | |
| | GTSESATPESGPGSEPATSGSETPGTTAEAAGCGTAEAAAGSPTSTEEGSPAGSP | |
| | TSTEEGTSTEPSEGSAPGTSESTAEAAGCGTAEAATPESGPGTSESATPESGPGS | |
| | EPATSGSETPGSEPATSGTAEAAGCGTAEAATEEGTSTEPSEGSAPGTSTEPSEG | |
| | SAPGSEPATSGSETPTAEAAGCGTAEAASASR | |
| Seg | SAGSPTAEAAGCGTAEAAGTSESATPESGPGSEPATSGSETPGTSESATPESGPG | 348 |
| 176 | TSTEPSEGSAPGTSESATPESGPGSPAGSPTSTEEGSPAGSPTSTEEGSPAGSPTST | |
| | EEGTSESATPESGPGTSTEPSEGSAPGTSESATPESGPGSEPATSGSETPGTSESA | |
| | TPESGPGSEPATSGSETPGTSESATPESGPGTSTEPSEGSAPTAEAAGCGTAEAA | |
| | GSPAGSPTSTEEGTSESATPESGPGSEPATSGSETPGTSESATPESGPGSPAGSPT | |
| | STEEGSPAGSPTSTEEGTSTEPSEGSAPGTSESATPESGPGTSESATPESGPGTSES | |
| | ATPESGPGSEPATSGSETPGSEPATSGSETPGSPAGSPTSTEEGTSTEPSEGSAPG | |
| | TSTEPSEGSAPGSEPATSGSETPTAEAAGCGTAEAASASR | |
| Seg | SAGSPTAEAAGCGTAEAAPGSEPATSGSETPGTSESATPESGPGSEPATSGSETP | 349 |
| 177 | GTAEAAGCGTAEAASTEPSEGSAPGTSESATPESGPGSPAGSPTSTEEGSPATAE | |
| | AAGCGTAEAASPTSTEEGTSESATPESGPGTSTEPSEGSAPGTSESATTAEAAGC | |
| | GTAEAASETPGTSESATPESGPGSEPATSGSETPGTSESATPESGTAEAAGCGTA | |
| | EAAGSPAGSPTSTEEGTSESATPESGPGSEPATSGSETPGTTAEAAGCGTAEAA | |
| | AGSPTSTEEGSPAGSPTSTEEGTSTEPSEGSAPGTSESTAEAAGCGTAEAATPES | |
| | GPGTSESATPESGPGSEPATSGSETPGSEPATSGTAEAAGCGTAEAATEEGTSTE | |
| | PSEGSAPGTSTEPSEGSAPGSEPATSGSETPTAEAAGCGTAEAASASR | |
| Seg | SAGSPTAEAAGCGTAEAAGSPAGSPTSTEEGTSESATPESGPGTSTEPSEGSAPG | 350 |
| 187 | SPAGSPTSTEEGTSTEPSEGSAPGTSTEPSEGSAPGTSESATPESGPGSEPATSGS | |
| | ETPGSEPATSGSETPGSPAGSPTSTEEGTSESATPESGPGTSTEPSEGSAPGTSTEP | |
| | SEGSAPGSPAGSPTSTEEGTSTEPSEGSAPGTSTEPSEGSAPGTSESATPESGPGT | |
| | STEPSEGSAPGTSESATPESGPGSEPATSGSETPGTSTEPSEGSAPGTSTEPSEGS | |
| | APGTSESATPESGPGTSESATPESGPGSPAGSPTSTEEGTSESATPESGPGSEPAT | |
| | SGSETPGTSESATPESGPGTSTEPSEGSAPGTSTEPSEGSAPGTSTEPSEGSAPGT | |
| | STEPSEGSAPGTSTEPSEGSAPGTSTEPSEGSAPGSPAGSPTSTEEGTSTEPSEGS | |
| | APGTSESATPESGPGSEPATSGSETPGTSESATPESGPGSEPATSGSETPGTSESA | |
| | TPESGPGTSTEPSEGSAPGTSESATPESGPGSPAGSPTSTEEGSPAGSPTSTEEGSP | |
| | AGSPTSTEEGTSESATPESGPGTSTEPSEGSAPGTSESATPESGPGSEPATSGSET | |
| | PGTSESATPESGPGSEPATSGSETPGTSESATPESGPGTSTEPSEGSAPGSPAGSP | |
| | TSTEEGTSESATPESGPGSEPATSGSETPGTSESATPESGPGSPAGSPTSTEEGSP | |
| | AGSPTSTEEGTSTEPSEGSAPGTSESATPESGPGTSESATPESGPGTSESATPESG | |
| | PGSEPATSGSETPGSEPATSGSETPGSPAGSPTSTEEGTSTEPSEGSAPGTSTEPSE | |
| | GSAPGSEPATSGSETPGTSESATPESGPGTSTEPSEGSAPSASR | |
| Seg | SAGSPTEGTSTEPSEGSAPGTSESTAEAAGCGTAEAATPESGPGTSESATPESGP | 351 |
| 188 | GSEPATSGSETPGSEPATSGTAEAAGCGTAEAATEEGTSTEPSEGSAPGTSTEPS | |
| | EGSAPGSEPATSGSETPTAEAAGCGTAEAASASR | |
| Seg | SAGSPTPGTSESATPESGPGSEPATSGSETPGTSESATPESGPGSEPATSGSETPG | 352 |
| 189 | TSESATPESGPGTSTEPSEGSAPGTSESATPESGPGSPAGSPTSTEEGSPAGSPTST | |
| | EEGSPAGSPTSTEEGTSESATPESGPGTSTEPSEGSAPGTSESATPESGPGSEPAT | |
| | SGSETPGTSESATPESGPGSEPATSGSETPGTSESATPESGPGTSTEPSEGSAPGSP | |
| | AGSPTSTEEGTSESATPESGPGSEPATSGSETPGTSESATPESGPGSPAGSPTSTE | |
| | EGSPAGSPTSTEEGTSTEPSEGSAPGTSESATPESGPGTSESATPESGPGTSESAT | |
| | PESGPGSEPATSGSETPGSEPATSGSETPGSPAGSPTSTEEGTSTEPSEGSAPGTS | |
| | TEPSEGSAPGSEPATSGSETPTAEAAGCGTAEAASASR | |
| Seg | SAGSPTGSEPATSGSETPGTSESATPESGPGSEPATSGSETPGTSESATPESGPGT | 353 |
| 190 | STEPSEGSAPGTSESATPESGPGSPAGSPTSTEEGSPAGSPTSTEEGSPAGSPTSTE | |
| | EGTSESATPESGPGTSTEPSEGSAPGTSESATPESGPGSEPATSGSETPGTSESAT | |
| | PESGPGSEPATSGSETPGTSESATPESGPGTSTEPSEGSAPTAEAAGCGTAEAAG | |
| | SPAGSPTSTEEGTSESATPESGPGSEPATSGSETPGTSESATPESGPGSPAGSPTST | |
| | EEGSPAGSPTSTEEGTSTEPSEGSAPGTSESTAEAAGCGTAEAATPESGPGTSES | |
| | ATPESGPGSEPATSGSETPGSEPATSGSETPGSPAGSPTSTEEGTSTEPSEGSAPG | |
| | TSTEPSEGSAPGSEPATSGSETPTAEAAGCGTAEAASASR | |
| Seg | SAGSPTPGTSESATPESGPGSEPATSGSETPGTSESATPESGPGSEPATSGSETPG | 354 |
| 191 | TSESATPESGPGTSTEPSEGSAPGTSESATPESGPGSPAGSPTSTEEGSPAGSPTST | |
| | EEGSPAGSPTSTEEGTSESATPESGPGTSTEPSEGSAPGTSESATPESGPGSEPAT | |
| | SGSETPGTSESATPESGPGSEPATSGSETPGTSESATPESGPGTSTEPSEGSAPGSP | |
| | AGSPTSTEEGTSESATPESGPGSEPATSGSETPGTSESATPESGPGSPAGSPTSTE | |
| | EGSPAGSPTSTEEGTSTEPSEGSAPGTSESTAEAAGCGTAEAATPESGPGTSESA | |
| | TPESGPGSEPATSGSETPGSEPATSGTAEAAGCGTAEAATEEGTSTEPSEGSAPG | |
| | TSTEPSEGSAPGSEPATSGSETPTAEAAGCGTAEAASASR | |
| Seg | SAGSPGSTSSTAESPGPGSTSSTAESPGPGCTSESPSGTAPGSTSSTAESPGPGSTS | 355 |
| 192 | STAESPGPGTSTPESGSASPGSTSCSPSGEAPGTSPSGESSTAPGSTSESPSGTAPG | |
| | STSESPSGTAPETSPSGESCTAPGSTSASR | |
| Seg | SAGSPGTPGSGTASSSPGSSTPSGATGSPGCAGSGTASSSPGSSTPSGATGSPGTP | 356 |
| 193 | GSGTASSSPGSSTPSGATGSPGSSTCSGATGSPGSSPSASTGTGPGSSPSASTGTG | |
| | PGASPGTSSTGSPGTPGSGTACSSPGSSSASR | |
| Seg | SAGSPGSPAGSPTSTEEGTSESATPESGPGTSTEPSEGSAPGSPAGSPTSTEEGTS | 357 |
| 194 | TEPSEGSAPGTSTEPSEGSAPGTSESATPESGPGSEPATSGSETPGSEPATSGSET | |
| | PGSPAGSPTSTEEGTSESATPESGPGTSTEPSEGSAPGTSTEPSEGSAPGSPAGSP | |
| | TSTEEGTSTEPSEGSAPGTSTEPSEGSAPGTSESATPESGPGTSTEPSEGSAPGTS | |
| | ESATPESGPGSEPATSGSETPGTSTEPSEGSAPGTSTEPSEGSAPGTSESATPESG | |
| | PGTSESATPESGPGSPAGSPTSTEEGTSESATPESGPGSEPATSGSETPGTSESAT | |
| | PESGPGTSTEPSEGSAPGTSTEPSEGSAPGTSTEPSEGSAPGTSTEPSEGSAPGTS | |
| | TEPSEGSAPGTSTEPSEGSAPGSPAGSPTSTEEGTSTEPSEGSAPGTSESATPESG | |
| | PGSEPATSGSETPGTSESATPESGPGSEPATSGSETPGTSESATPESGPGTSTEPSE | |
| | GSAPGTSESATPESGPGSPAGSPTSTEEGSPAGSPTSTEEGSPAGSPTSTEEGTSE | |
| | SATPESGPGTSTEPSEGSAPGTSESATPESGPGSEPATSGSETPGTSESATPESGP | |
| | GSEPATSGSETPGTSESATPESGPGTSTEPSEGSAPGSPAGSPTSTEEGTSESATP | |
| | ESGPGSEPATSGSETPGTSESATPESGPGSPAGSPTSTEEGSPAGSPTSTEEGTST | |
| | EPSEGSAPGTSESATPESGPGTSESATPESGPGTSESATPESGPGSEPATSGSETP | |
| | GSEPATSGSETPGSPAGSPTSTEEGTSTEPSEGSAPGTSTEPSEGSAPGSEPATSG | |
| | SETPGTSESATPESGPGTESASK | |
| Seg | SAGSPTGPGSEPATSGSETPGTSESATPESGPGSEPATSGSETPGTSESATPESGP | 358 |
| 195 | GTSTEPSEGSAPGSPAGSPTSTEEGTSESATPESGPGSEPATSGSETPGTSESATP | |
| | ESGPGSPAGSPTSTEEGSPAGSPTSTEEGTSTEPSEGSAPGTSESATPESGPGTSE | |
| | SATPESGPGTSESATPESGPGSEPATSGSETPGSEPATSGSETPGSPAGSPTSTEE | |
| | GTSTEPSEGSAPGTSTEPSEGSAPGSEPATSGSETPGTSESATPESGPGTSTACSE | |
| | GSAPSASR | |
| Seg | SAGSPTGPGSEPATSGSETPGTSESATPESGPGSEPATSGSETPGTSESATPESGP | 359 |
| 196 | GTSTEPSEGSAPGSPAGSPTSTEEGTSESATPESGPGSEPATSGSETPGTSESATP | |
| | ESGPGSPAGSPTSTEEGSPAGSPTSTEEGTSTEPSEGSAPGTSESATPESGPGTSE | |
| | SATPESGPGTSESATPESGPGSEPATSGSETPGSEPATSGSETPGSPAGSPTSTEE | |
| | GTSTEPSEGSAPGTSTEPSEGSAPGSEPATSGSETPGTSESATPESGPGTSTEPSE | |
| | GSCASASR | |
| Seg | SAGSPGSCAGSPTSTEEGTSESACPESGPGTSTEPSEGSCPGSPAGSPTSTEEGTC | 360 |
| 197 | TEPSEGSAPGTSTEPCSGSAPGTSESATPESCPGSEPATSGSETPGSCPATSGSET | |
| | PGSPAGSCTSTEEGTSESATPESCPGTESASR | |
| Seg | SAGSPTGCGSEPATSGSETPGTSESATPESGPGSEPATSGSETPGTSESATPESGP | 361 |
| 198 | GTSTEPSEGSAPGSPAGSPTSTEEGTSESATPESGPGSEPATSGSETPGTSESATP | |
| | ESGPGSPAGSPTSTEEGSPAGSPTSTEEGTSCTPSEGSAPGTSESATPESGPGTSE | |
| | SATPESGPGTSESATPESGPGSEPATSGSETPGSEPATSGSETPGSPAGSPTSTEE | |
| | GTSTEPSEGSAPGTSTEPSEGSAPGSEPATSGSETPGTSESATPESGPGTSTEPSC | |
| | GSAPSASR | |
| Seg | SAGSPTGCGSEPATSGSETPGTSESATPESGPGSEPATSGSCTPGTSESATPESGP | 362 |
| 199 | GTSTEPSEGSAPGSPAGSPCSTEEGTSESATPESGPGSEPATSGSETPGTSESCTP | |
| | ESGPGSPAGSPTSTEEGSPAGSPTSTEEGTSCTPSEGSAPGTSESATPESGPGTSE | |
| | SATPESGPGCSESATPESGPGSEPATSGSETPGSEPATSGSETCGSPAGSPTSTEE | |
| | GTSTEPSEGSAPGTSTEPSEGCAPGSEPATSGSETPGTSESATPESGPGTSTEPSC | |
| | GSAPSASR | |
| Seg | SAGSPTGSEPATSGSETPGTSESATPESGPGSEPATSGSETPGTSESATPESGPGT | 363 |
| 200 | STEPSEGSAPGTSESATPESGPGSPAGSPTSTEEGSPAGSPTSTEEGSPAGSPTSTE | |
| | EGTSESATPESGPGTSTEPSEGSAPGTSESATPESGPGSEPATSGSETPGTSESAT | |
| | PESGPGSEPATSGSETPGTSESATPESGPGTSTEPSEGSAPTAEAAGCGTAEAAG | |
| | SPAGSPTSTEEGTSESATPESGPGSEPATSGSETPGTSESATPESGPGSPAGSPTST | |
| | EEGSPAGSPTSTEEGTSTEPSEGSAPGTSESATPESGPGTSESATPESGPGTSESA | |
| | TPESGPGSEPATSGSETPGSEPATSGSETPGSPAGSPTSTEEGTSTEPSEGSAPGT | |
| | STEPSEGSAPGSEPATSGSETPGTSESATPESGPGSASR | |
| Seg | SAGSPGAPGTSESATPESGPGTSESATPESGPGTSESATPESGPGSEPATSGSETP | 364 |
| 201 | GSEPATSGSETPGSPAGSPTSTEEGTSTEPSEGSAPGTSTEPSEGSAPGSEPATSG | |
| | SETPGTSESATPESGPGTSTEPSEGSCASASR | |
| Seg | SAGSPTAEAAGCGTAEAATSESATPESGPGTSTEPSEGSAPGSPAGSPTSTEEGT | 365 |
| 203 | STEPSEGSAPGTSTEPSEGSAPGTSESATPESGPGSEPATSGSETPGSEPATSGSE | |
| | TPGSPAGSPTSTEEGTSESATPESGPGTSTEPSEGSAPGTSTEPSEGSAPGSPAGS | |
| | PTSTEEGTSTEPSEGSAPGTSTEPSEGSAPGTSESATPESGPGTSTEPSEGSAPGTS | |
| | ESATPESGPGSEPATSGSETPGTSTEPSEGSAPGTSTEPSEGSAPGTSESATPESG | |
| | PGTSESATPESGPGSPAGSPTSTEEGTSESATPESGPGSEPATSGSETPGTSESAT | |
| | PESGPGTSTEPSEGSAPGTSTEPSEGSAPGTSTEPSEGSAPGTSTEPSEGSAPGTS | |
| | TEPSEGSAPGTSTEPSEGSAPGSPAGSPTSTEEGTSTEPSEGSAPGTSESATPESG | |
| | PGSEPATSGSETPGTSESATPESGPGSEPATSGSETPGTSESATPESGPGTSTEPSE | |
| | GSAPGTSESATPESGPGSPAGSPTSTEEGSPAGSPTSTEEGSPAGSPTSTEEGTSE | |
| | SATPESGPGTSTEPSEGSAPGTSESATPESGPGSEPATSGSETPGTSESATPESGP | |
| | GSEPATSGSETPGTSESATPESGPGTSTEPSEGSAPGSPAGSPTSTEEGTSESATP | |
| | ESGPGSEPATSGSETPGTSESATPESGPGSPAGSPTSTEEGSPAGSPTSTEEGTST | |
| | EPSEGSAPGTSESATPESGPGTSESATPESGPGTSESATPESGPGSEPATSGSETP | |
| | GSEPATSGSETPGSPAGSPTSTEEGTSTEPSEGSAPGTSTEPSEGSAPGSEPATSG | |
| | SETPGTSESATPESGPGTESASR | |
| Seg | SAGSPGSPAGSPTSTEEGTSESATPESGPGTSTEPSEGSAPGSPAGSPTSTEEGTS | 366 |
| 204 | TEPSEGSAPGTSTEPSEGSAPGTSESATPESGPGSEPATSGSETPGSEPATSGSET | |
| | PGSPAGSPTSTEEGTSESATPESGPGTSTEPSEGSAPGTSTEPSEGSAPGSPAGSP | |
| | TSTEEGTSTEPSEGSAPGTSTEPSEGSAPGTSESATPESGPGTSTEPSEGSAPGTS | |
| | ESATPESGPGSEPATSGSETPGTSTEPSEGSAPGTSTEPSEGSAPGTSESATPESG | |
| | PGTSESATPESGPGSPAGSPTSTEEGTSESATPESGPGSEPATSGSETPGTSESAT | |
| | PESGPGTSTEPSEGSAPGTSTEPSEGSAPGTSTEPSEGSAPGTSTEPSEGSAPGTS | |
| | TEPSEGSAPGTSTEPSEGSAPGSPAGSPTSTEEGTSTEPSEGSAPGTSESATPESG | |
| | PGSEPATSGSETPGTSESATPESGPGSEPATSGSETPGTSESATPESGPGTSTEPSE | |
| | GSAPGTSESATPESGPGSPAGSPTSTEEGSPAGSPTSTEEGSPAGSPTSTEEGTSE | |
| | SATPESGPGTSTEPSEGSAPGTSESATPESGPGSEPATSGSETPGTSESATPESGP | |
| | GSEPATSGSETPGTSESATPESGPGTSTEPSEGSAPGSPAGSPTSTEEGTSESATP | |
| | ESGPGSEPATSGSETPGTSESATPESGPGSPAGSPTSTEEGSPAGSPTSTEEGTST | |
| | EPSEGSAPGTSESATPESGPGTSESATPESGPGTSESATPESGPGSEPATSGSETP | |
| | GSEPATSGSETPGSPAGSPTSTEEGTSTEPSEGSAPGTSTEPSEGSAPGSEPATSG | |
| | SETPGSTAEAAGCGTAEAASASR | |
| Seg | SAGSPTAEAAGCGTAEAATSESATPESGPGTSTEPSEGSAPGSPAGSPTSTEEGT | 367 |
| 205 | STEPSEGSAPGTSTEPSEGSAPGTSESATPESGPGSEPATSGSETPGSEPATSGSE | |
| | TPGSPAGSPTSTEEGTSESATPESGPGTSTEPSEGSAPGTSTEPSEGSAPGSPAGS | |
| | PTSTEEGTSTEPSEGSAPGTSTEPSEGSAPGTSESATPESGPGTSTEPSEGSAPGTS | |
| | ESATPESGPGSEPATSGSETPGTSTEPSEGSAPGTSTEPSEGSAPGTSESATPESG | |
| | PGTSESATPESGPGSPAGSPTSTEEGTSESATPESGPGSEPATSGSETPGTSESAT | |
| | PESGPGTSTEPSEGSAPGTSTEPSEGSAPGTSTEPSEGSAPGTSTEPSEGSAPGTS | |
| | TEPSEGSAPGTSTEPSEGSAPGSPAGSPTSTEETAEAAGCGTAEAATSESATPES | |
| | GPGSEPATSGSETPGTSESATPESGPGSEPATSGSETPGTSESATPESGPGTSTEP | |
| | SEGSAPGTSESATPESGPGSPAGSPTSTEEGSPAGSPTSTEEGSPAGSPTSTEEGT | |
| | SESATPESGPGTSTEPSEGSAPGTSESATPESGPGSEPATSGSETPGTSESATPES | |
| | GPGSEPATSGSETPGTSESATPESGPGTSTEPSEGSAPGSPAGSPTSTEEGTSESA | |
| | TPESGPGSEPATSGSETPGTSESATPESGPGSPAGSPTSTEEGSPAGSPTSTEEGT | |
| | STEPSEGSAPGTSESATPESGPGTSESATPESGPGTSESATPESGPGSEPATSGSE | |
| | TPGSEPATSGSETPGSPAGSPTSTEEGTSTEPSEGSAPGTSTEPSEGSAPGSEPAT | |
| | SGSETPGSTAEAAGCGTAEAASASR | |
| Seg | SAGSPTGSEPATSGSETPGTSESATPESGPGSEPATSGSETPGTSESATPESGPGT | 368 |
| 206 | STEPSEGSAPGTSESATPESGPGSPAGSPTSTEEGSPAGSPTSTEEGSPAGSPTSTE | |
| | EGTSESATPESGPGTSTEPSEGSAPGTSESATPESGPGSEPATSGSETPGTSESAT | |
| | PESGPGSEPATSGSETPGTSESATPESGPGTSTEPSEGSAPTAEAAGCGTAEAAG | |
| | SPAGSPTSTEEGTSESATPESGPGSEPATSGSETPGTSESATPESGPGSPAGSPTST | |
| | EEGSPAGSPTSTEEGTSTEPSEGSAPGTSESATPESGPGTSESATPESGPGTSESA | |
| | TPESGPGSEPATSGSETPGSEPATSGSETPGSPAGSPTSTEEGTSTEPSEGSAPGT | |
| | STEPSEGSAPGSEPATSGSETPTAEAAGCGTAEAASASR | |
| Seg | ATAEAAGCGTAEAAGSPAGSPTSTEEGTSESATPESGPGTSTEPSEGSAPGSPA | 369 |
| 207 | GSPTSTEEGTSTEPSEGSAPGTSTEPSEGSAPGTSESATPESGPGSEPATSGSETP | |
| | GSEPATSGSETPGSPAGSPTSTEEGTSESATPESGPGTSTEPSEGSAPGTSTEPSE | |
| | GSAPGSPAGSPTSTEEGTSTEPSEGSAPGTSTEPSEGSAPGTSESATPESGPGTST | |
| | EPSEGSAPGTSESATPESGPGSEPATSGSETPGTSTEPSEGSAPGTSTEPSEGSAP | |
| | GTSESATPESGPGTSESATPESGPGSPAGSPTSTEEGTSESATPESGPGSEPATSG | |
| | SETPGTSESATPESGPGTSTEPSEGSAPGTSTEPSEGSAPGTSTEPSEGSAPGTSTE | |
| | PSEGSAPGTSTEPSEGSAPGTSTEPSEGSAPGSPAGSPTSTEEGTSTEPSEGSAPG | |
| | TSESATPESGPGSEPATSGSETPGTSESATPESGPGSEPATSGSETPGTSESATPES | |
| | GPGTSTEPSEGSAPGTSESATPESGPGSPAGSPTSTEEGSPAGSPTSTEEGSPAGS | |
| | PTSTEEGTSESASASR | |
| Seg | SAGSPGSPAGSPTSTENLYFQSATPESGPGTSTEPSEGSAPGSPAGSPTSTEEGTS | 370 |
| 208 | TEPSEGSAPGTSTEPSEGSAPGTSESATPESGPGSEPATSGSETPGSEPATSGSET | |
| | PGSPAGSPTSTEEGTSESATPESGPGTSTEPSEGSAPGTSTEPSEGSAPGSPAGSP | |
| | TSTEEGTSTEPSEGSAPGTSTEPSEGSAPGTSESATPESGPGTSTEPSEGSAPGTS | |
| | ESATPESGPGSEPATSGSETPGTSTEPSEGSAPGTSTEPSEGSAPGTSESATPESG | |
| | PGTSESATPESGPGSPAGSPTSTEEGTSESATPESGPGSEPATSGSETPGTSESAT | |
| | PESGPGTSTEPSEGSAPGTSTEPSEGSAPGTSTEPSEGSAPGTSTEPSEGSAPGTS | |
| | TEPSEGSAPGTSTEPSEGSAPGSPAGSPTSTEEGTSTEPSEGSAPGTSESATPESG | |
| | PGSEPATSGSETPGTSESATPESGPGSEPATSGSETPGTSESATPESGPGTSTEPSE | |
| | GSAPGTSESATPESGPGSPAGSPTSTEEGSPAGSPTSTEEGSPAGSPTSTEEGTSE | |
| | SATPESGPGTSTEPSEGSAPGTSESATPESGPGSEPATSGSETPGTSESATPESGP | |
| | GSEPATSGSETPGTSESATPESGPGTSTEPSEGSAPGSPAGSPTSTEEGTSESATP | |
| | ESGPGSEPATSGSETPGTSESATPESGPGSPAGSPTSTEEGSPAGSPTSTEEGTST | |
| | EPSEGSAPGTSESATPESGPGTSESATPESGPGTSESATPESGPGSEPATSGSETP | |
| | GSEPATSGSETPGSPAGSPTSTEEGTSTEPSEGSAPGTSTEPSEGSAPGSEPATSG | |
| | SETPGSTAEAAGCGTAEAASASR | |
| Seg | SACSPGSPAGSPTSTEEGTSESATPESGPGTSTEPSEGSAPGSPAGSPTSTEEGTS | 371 |
| 210 | TEPSEGSAPGTSTEPSEGSAPGTSESATPESGPGSEPATSGSETPGSEPATSGSET | |
| | PGSPAGSPTSTEEGTSESATPESGPGTSTEPSEGSAPGTSTEPSEGSAPGSPAGSP | |
| | TSTEEGTSTEPSEGSAPGTSTEPSEGSAPGTSESATPESGPGTSTEPSEGSAPGTS | |
| | ESATPESGPGSEPATSGSETPGTSTEPSEGSAPGTSTEPSEGSAPGTSESATPESG | |
| | PGTSESATPESGPGSPAGSPTSTEEGTSESATPESGPGSEPATSGSETPGTSESAT | |
| | PESGPGTSTEPSEGSAPGTSTEPSEGSAPGTSTEPSEGSAPGTSTEPSEGSAPGTS | |
| | TEPSEGSAPGTSTEPSEGSAPGSPAGSPTSTEEGTSTEPSEGSAPGTSESATPESG | |
| | PGSEPATSGSETPGTSESATPESGPGSEPATSGSETPGTSESATPESGPGTSTEPSE | |
| | GSAPGTSESATPESGPGSPAGSPTSTEEGSPAGSPTSTEEGSPAGSPTSTEEGTSE | |
| | SATPESGPGTSTEPSEGSAPGTSESATPESGPGSEPATSGSETPGTSESATPESGP | |
| | GSEPATSGSETPGTSESATPESGPGTSTEPSEGSAPGSPAGSPTSTEEGTSESATP | |
| | ESGPGSEPATSGSETPGTSESATPESGPGSPAGSPTSTEEGSPAGSPTSTEEGTST | |
| | EPSEGSAPGTSESATPESGPGTSESATPESGPGTSESATPESGPGSEPATSGSETP | |
| | GSEPATSGSETPGSPAGSPTSTEEGTSTEPSEGSAPGTSTEPSEGSAPGSEPATSG | |
| | SETPGTSESATPESGPGTCSASR | |
| Seg | SAGSPGSPAGSPTSTEEGTSESATPESGPGTSTEPSEGSAPGSPAGSPTSTEEGTS | 372 |
| 211 | TEPSEGSAPGTSTEPSEGSAPGTSESATPESGPGSEPATSGSETPGSEPATSGSET | |
| | PGSPAGSPTSTEEGTSESATPESGPGTSTEPSEGSAPGTSTEPSEGSAPGSPAGSP | |
| | TSTEEGTSTEPSEGSAPGTSTEPSEGSAPGTSESATPESGPGTSTEPSEGSAPGTS | |
| | ESATPESGPGSEPATSGSETPGTSTEPSEGSAPGTSTEPSEGSAPGTSESATPESG | |
| | PGTSESATPESGPGSPAGSPTSTEEGTSESATPESGPGSEPATSGSETPGTSESAT | |
| | PESGPGTSTEPSEGSAPGTSTEPSEGSAPGTSTEPSEGSAPGTSTEPSEGSAPGTS | |
| | TEPSEGSAPGTSTEPSEGSAPGSPAGSPTSTEEGTSTEPSEGSAPGTSESATPESG | |
| | PGSEPATSGSETPGTSESATPESGPGSEPATSGSETPGTSESATPESGPGTSTEPSE | |
| | GSAPGTSESATPESGPGSPAGSPTSTEEGSPAGSPTSTEEGSPAGSPTSTEEGTSE | |
| | SATPESGPGTSTEPSEGSAPGTSESATPESGPGSEPATSGSETPGTSESATPESGP | |
| | GSEPATSGSETPGTSESATPESGPGTSTEPSEGSAPGSPAGSPTSTEEGTSESATP | |
| | ESGPGSEPATSGSETPGTSESATPESGPGSPAGSPTSTEEGSPAGSPTSTEEGTST | |
| | EPSEGSAPGTSESATPESGPGTSESATPESGPGTSESATPESGPGSEPATSGSETP | |
| | GSEPATSGSETPGSPAGSPTSTEEGTSTEPSEGSAPGTSTEPSEGSAPGSEPATCG | |
| | SETPGTSESATPESGPGTCSASR | |
| Seg | SAGSPGSCAGSPTSTEEGTSESACSPEGPGTSTEPSEGSCGPSPAGSPTSTEEGTC | 373 |
| 212 | TEPSEGSAPGTSEPTCSGSAPGTSESATPESCGPSEPATSGSETPGSCAPTSGSET | |
| | PGSPAGSCTSTEEGTSESATPESCGPTESASR | |
| Seg | SAGSPGSCSSTAESPGPGSTSSTCSEPGPGSTSESPSGTCGPSTSSTAESPGPGSCS | 374 |
| 213 | STAESPGPGTSPETCGSASPGSTSESPSGTCGPTSPSGESSTAPGSCSESPSGTAP | |
| | GSTSESCSGTAPETSPSGESSTCGPSTSASR | |
| Seg | SAGSPGSPAGSPTSTEEGTSESATPESGPGTSTEPSEGSAPGSPAGSPTSTEEGTS | 375 |
| 214 | TEPSEGSAPGTSTEPSEGSAPGTSESATPESGPGSEPATSGSETPGSEPATSGSET | |
| | PGSPAGSPTSTEEGTSESATPESGPGTESASK | |
| Seg | SAGSPTGPGSEPATSGSETPGTSESATPESGPGSEPATSGSETPGTSESATPESGP | 376 |
| 215 | GTSTEPSEGSAPGSPAGSPTSTEEGTSESATPESGPGSEPATSGSETPGTSESATP | |
| | ESGPGSPAGSPTSTEEGSPAGSPTSTEEGTSTEPSEGSAPGTSESATPESGPGTSE | |
| | SATPESGPGTSESATPESGPGSEPATSGSETPGSEPATSGSETPGSPAGSPTSTEE | |
| | GTSTEPSEGSAPGTSTEPSEGSAPGSEPATSGSETPGTSESATPESGPGTSTEPSE | |
| | GSAPSASK | |
| Seg | SAGSPTGTSESATPESGPGTSTEPSEGSAPGTSESATPESGPGSEPATSGSETPGT | 377 |
| 216 | SESATPESGPGSEPATSGSETPGTSESATPESGPGTSTEPSEGSAPTAEAAGCGT | |
| | AEAAGSPAGSPTSTEEGTSESATPESGPGSEPATSGSETPGTSESATPESGPGSPA | |
| | GSPTSTEEGSPAGSPTSTEEGTSTEPSEGSAPGTSESATPESGPGSASR | |
| Seg | SAGSPTGSPAGSPTSTEEGSPAGSPTSTEEGSPAGSPTSTEEGTSESATPESGPGT | 378 |
| 217 | STEPSEGSAPGTSESATPESGPGSEPATSGSETPGTSESATPESGPGSEPATSGSE | |
| | TPGTSESATPESGPGTSTEPSEGSAPTAEAAGCGTAEAAGSPAGSPTSTEEGTSE | |
| | SATPESGPGSEPATSGSETPGTSESATPESGPGSPAGSPTSTEEGSPAGSPTSTEE | |
| | GTSTEPSEGSAPGTSESATPESGPGTSESATPESGPGTSESATPESGPGSEPATSG | |
| | SETPGSASR | |
| Seg | SAGSPGSCAGSPTSTENLYFQSATPESGPGTSTEPSEGSAPGSPAGSPTSTEEGTS | 379 |
| 218 | TEPSEGSAPGTSTEPSEGSAPGTSESATPESGPGSEPATSGSETPGSEPATSGSET | |
| | PGSPAGSPTSTEEGTSESATPESGPGTSTEPSEGSAPGTSTEPSEGSAPGSPAGSP | |
| | TSTEEGTSTEPSEGSAPGTSTEPSEGSAPGTSESATPESGPGTSTEPSEGSAPGTS | |
| | ESATPESGPGSEPATSGSETPGTSTEPSEGSAPGTSTEPSEGSAPGTSESATPESG | |
| | PGTSESATPESGPGSPAGSPTSTEEGTSESATPESGPGSEPATSGSETPGTSESAT | |
| | PESGPGTSTEPSEGSAPGTSTEPSEGSAPGTSTEPSEGSAPGTSTEPSEGSAPGTS | |
| | TEPSEGSAPGTSTEPSEGSAPGSPAGSPTSTEEGTSTEPSEGSAPGTSESATPESG | |
| | PGSEPATSGSETPGTSESATPESGPGSEPATSGSETPGTSESATPESGPGTSTEPSE | |
| | GSAPGTSESATPESGPGSPAGSPTSTEEGSPAGSPTSTEEGSPAGSPTSTEEGTSE | |
| | SATPESGPGTSTEPSEGSAPGTSESATPESGPGSEPATSGSETPGTSESATPESGP | |
| | GSEPATSGSETPGTSESATPESGPGTSTEPSEGSAPGSPAGSPTSTEEGTSESATP | |
| | ESGPGSEPATSGSETPGTSESATPESGPGSPAGSPTSTEEGSPAGSPTSTEEGTST | |
| | EPSEGSAPGTSESATPESGPGTSESATPESGPGTSESATPESGPGSEPATSGSETP | |
| | GSEPATSGSETPGSPAGSPTSTEEGTSTEPSEGSAPGTSTEPSEGSAPGSEPATSG | |
| | SETPGTSESATPESGPGTESASPSAHHHHHHHH | |
| Seg | SAGSPGTSESATPESGPGSEPATSGSETPGTSTEPSEGSAPGTSTEPSEGSAPGTS | 380 |
| 219 | ESATPESGPGTSESATPESGPGSPAGSPTSTEEGTSESATPESGPGSEPATSGSET | |
| | PGTSESATPESGPGTSTEPSEGSAPGTSTEPSEGSAPGTSTEPSEGSAPGTSTEPSE | |
| | GSAPGTSTEPSEGSAPGTSTEPSEGSAPGSPAGSPTSTEEGTSTEPSEGSAPGTSE | |
| | SATPESGPGSEPATSGSETPGTSESATPESGPGSEPATSGSETPGTSESATPESGP | |
| | GTSTEPSEGSAPGTSESATPESGPGSPAGSPTSTEEGSPAGSPTSTEEGSPAGSPT | |
| | STEEGTSESATPESGPGTSTEPSEGSAPGTSESATPESGPGSEPATSGSETPGTSES | |
| | ATPESGPGSEPATSGSETPGTSESATPESGPGTSTEPSEGSAPGSPAGSPTSTEEG | |
| | TSESATPESGPGSEPATSGSETPGTSESATPESGPGSPAGSPTSTEEGSPAGSPTST | |
| | EEGTSTEPSEGSAPGTSESATPESGPGTSESATPESGPGTSESATPESGPGSEPAT | |
| | SGSETPGSEPATSGSETPGSPAGSPTSTEEGTSTEPSEGSAPGTSTEPSEGSAPGS | |
| | EPATSGSETPGSTAEAAGCGTAEAASASR | |
| Seg | GSPGAGSPAGSPTSTEEGTSESATPESGPGTSTEPSEGSAPGSPAGSPTSTEEGTS | 381 |
| 220 | TEPSEGSAPGTSTEPSEGSAPGTSESATPESGPGSEPATSGSETPGSEPATSGSET | |
| | PGSPAGSPTSTEEGTSESATPESGPGTSTEPSEGSAPGTSTEPSEGSAPGSPAGSP | |
| | TSTEEGTSTEPSEGSAPGTSTEPSEGSAPGTSESATPESGPGTSTEPSEGSAPGTS | |
| | ESATPESGPGSEPATSGSETPGTSTEPSEGSAPGTSTEPSEGSAPGTSESATPESG | |
| | PGTSESATPESGPGSPAGSPTSTEEGTSESATPESGPGSEPATSGSETPGTSESAT | |
| | PESGPGTSTEPSEGSAPGTSTEPSEGSAPGTSTEPSEGSAPGTSTEPSEGSAPGTS | |
| | TEPSEGSAPGTSTEPSEGSAPGSPAGSPTSTEEGTSTEPSEGSAPGTSESATPESG | |
| | PGSEPATSGSETPGTSESATPESGPGSEPATSGSETPGTSESATPESGPGTSTEPSE | |
| | GSAPGTSESATPESGPGSPAGSPTSTEEGSPAGSPTSTEEGSPAGSPTSTEEGTSE | |
| | SATPESGPGTSTEPSEGSAPGTSESATPESGPGSEPATSGSETPGTSESATPESGP | |
| | GSEPATSGSETPGTSESATPESGPGTSTEPSEGSAPGSPAGSPTSTEEGTSESATP | |
| | ESGPGSEPATSGSETPGTSESATPESGPGSPAGSPTSTEEGSPAGSPTSTEEGTST | |
| | EPSEGSAPGTSESATPESGPGTSESATPESGPGTSESATPESGPGSEPATSGSETP | |
| | GSEPATSGSETPGSPAGSPTSTEEGTSTEPSEGSAPGTSTEPSEGSAPGSEPATSG | |
| | SETPGTSESATPESGPGTESASK | |
| Seg | GSPGAGPSEPATSGSETPGTSESATPESGPGSEPATSGSETPGTSESATPESGPGT | 382 |
| 221 | STEPSEGSAPTAEAAGCGTAEAAGSPAGSPTSTEEGTSESATPESGPGSEPATSG | |
| | SETPGTSESATPESGPGSPAGSPTSTEEGSASK | |
| Seg | GSPGAGEGTSTEPSEGSAPGTSESTAEAAGCGTAEAATPESGPGTSESATPESGP | 383 |
| 222 | GSEPATSGSETPGSEPATSGTAEAAGCGTAEAATEEGTSTEPSEGSAPGTSTEPS | |
| | EGSAPGSEPATSGSETPTAEAAGCGTAEAASASG | |
| Seg | GSPGAGSEPATSGSETPGTSESATPESGPGSEPATSGSETPGTSESATPESGPGTS | 384 |
| 223 | TEPSEGSAPGTSESATPESGPGSPAGSPTSTEEGSPAGSPTSTEEGSPAGSPTSTE | |
| | EGTSESATPESGPGTSTEPSEGSAPGTSESATPESGPGSEPATSGSETPGTSESAT | |
| | PESGPGSEPATSGSETPGTSESATPESGPGTSTEPSEGSAPTAEAAGCGTAEAAG | |
| | SPAGSPTSTEEGTSESATPESGPGSEPATSGSETPGTSESATPESGPGSPAGSPTST | |
| | EEGSPAGSPTSTEEGTSTEPSEGSAPGTSESATPESGPGTSESATPESGPGTSESA | |
| | TPESGPGSEPATSGSETPGSEPATSGSETPGSPAGSPTSTEEGTSTEPSEGSAPGT | |
| | STEPSEGSAPGSEPATSGSETPGTSESATPESGPGTSASR | |
| Seg | GSPGAGSEPATSGSETPGTSESATPESGPGSEPATSGSETPGTSESATPESGPGTS | 385 |
| 224 | TEPSEGSAPGTSESATPESGPGSPAGSPTSTEEGSPAGSPTSTEEGSPAGSPTSTE | |
| | EGTSESATPESGPGTSTEPSEGSAPGTSESATPESGPGSEPATSGSETPGTSESAT | |
| | PESGPGSEPATSGSETPGTSESATPESGPGTSTEPSEGSAPTAEAAGCGTAEAAG | |
| | SPAGSPTSTEEGTSESATPESGPGSEPATSGSETPGTSESATPESGPGSPAGSPTST | |
| | EEGSPAGSPTSTEEGTSTEPSEGSAPGTSESATPESGTAEAAGCGTAEAAGTSES | |
| | ATPESGPGSEPATSGSETPGSEPATSGSETPGSPAGSPTSTEEGTSTEPSEGSAPG | |
| | TSTEPSEGSAPGSEPATSGSETPGTSESATPESGPGTSASR | |
| Seg | GSPGAGSEPATSGSETPGTSESATPESGPGSEPATSGSETPGTSESATPESGPGTS | 386 |
| 225 | TEPSEGSAPGTSESATPESGPGSPAGSPTSTEEGSPAGSPTSTEETAEAAGCGTA | |
| | EAATSESATPESGPGTSTEPSEGSAPGTSESATPESGPGSEPATSGSETPGTSESA | |
| | TPESGPGSEPATSGSETPGTSESATPESGPGTSTEPSEGSAPTAEAAGCGTAEAA | |
| | GSPAGSPTSTEEGTSESATPESGPGSEPATSGSETPGTSESATPESGPGSPAGSPT | |
| | STEEGSPAGSPTSTEEGTSTEPSEGSAPGTSESATPESGTAEAAGCGTAEAAGTS | |
| | ESATPESGPGSEPATSGSETPGSEPATSGSETPGSPAGSPTSTEEGTSTEPSEGSA | |
| | PGTSTEPSEGSAPGSEPATSGSETPGTSESATPESGPGTSASR | |
| Seg | GSPGAGSPAGSPTSTEEGTSESATPESGPGTSTEPCSGSAPGSPAGSPTSTEEGTS | 387 |
| 226 | TEPSEGSAPGTSTEPCSGSAPGTSESATPESGPGSEPATSGSETPGSEPATCGSET | |
| | PGSPAGSPTSTEEGTSESATPESGPGTESASR | |
| Seg | GSPGAGSPAGSPTSTEEGTSESATPESGPGTSTEGCGESAPGSPAGSPTSTEEGTS | 388 |
| 227 | TEPSEGSAPGTSTEGCGESAPGTSESATPESGPGSEPATSGSETPGSEPAGCGSET | |
| | PGSPAGSPTSTEEGTSESATPESGPGTESASR | |
| Seg | GSPGAGSPAGSPTSTEEGTSESATPESGPGTSTEPSEGSAPGSPAGSPTSGCGETS | 389 |
| 228 | TEPSEGSAPGTSTEGCGESAPGTSESATPESGPSGCGATSGSETPGSEPATSGSET | |
| | PGSPAGSPTSTEEGTSESATPESGPGTESASR | |
| Seg | GSPGAGSPAGSPTSTEEGTSESATPESGPGTSTEPSEGSAPGSPAGSPTSTEEGTS | 390 |
| 229 | TEPSGCGAPGTSTEGCGESAPGTSGCGTPESGPGSEPATSGSETPGSEPATSGSE | |
| | TPGSPAGSPTSTEEGTSESATPESGPGTESASR | |
| Seg | GSPGAGSPAGSPTSTEEGTSESATPESGPGCGTEPSEGSAPGSPGCGPTSTEEGT | 391 |
| 230 | STEPGCGSAPGTESASR | |
| Seg | GSPGAGSCAGSPTSTEEGTSESACSPEGPGTSTEPSEGSCGGPGSPAGSPTSTEE | 392 |
| 231 | GTSESATPESGPGTSTEPSEGSAPGSPAGSPTSTEEGTSTEPSEGSAPGTSTEPSE | |
| | GSAPGTSESATPESGPGSEPATSGSETPGSEPATSGSETPGSPAGSPTSTEEGTSE | |
| | SATPESGPGTSTEPSEGSAPGTSTEPSEGSAPGSPAGSPTSTEEGTSTEPSEGSAP | |
| | GTSTEPSEGSAPGTSESATPESGPGTSTEPSEGSAPGTSESATPESGPGSEPATSG | |
| | SETPGTSTEPSEGSAPGTSTEPSEGSAPGTSESATPESGPGTSESATPESGPGSPA | |
| | GSPTSTEEGTSESATPESGPGSEPATSGSETPGTSESATPESGPGTSTEPSEGSAP | |
| | GTSTEPSEGSAPGTSTEPSEGSAPGTSTEPSEGSAPGTSTEPSEGSAPGTSTEPSE | |
| | GSAPGSPAGSPTSTEEGTSTEPSEGSAPGTSESATPESGPGSEPATSGSETPGTSE | |
| | SATPESGPGSEPATSGSETPGTSESATPESGPGTSTEPSEGSAPGTSESATPESGP | |
| | GSPAGSPTSTEEGSPAGSPTSTEEGSPAGSPTSTEEGTSESATPESGPGTSTEPSE | |
| | GSAPGTSESATPESGPGSEPATSGSETPGTSESATPESGPGSEPATSGSETPGTSE | |
| | SATPESGPGTSTEPSEGSAPGSPAGSPTSTEEGTSESATPESGPGSEPATSGSETP | |
| | GTSESATPESGPGSPAGSPTSTEEGSPASASR | |
| Seg | GSPGAGSCAGSPTSTEEGTSESACSPEGPGTSTEPSEGSCGGLSGRSDNHSPLGL | 393 |
| 232 | AGSPGSPAGSPTSTEEGTSESATPESGPGTSTEPSEGSAPGSPAGSPTSTEEGTST | |
| | EPSEGSAPGTSTEPSEGSAPGTSESATPESGPGSEPATSGSETPGSEPATSGSETP | |
| | GSPAGSPTSTEEGTSESATPESGPGTSTEPSEGSAPGTSTEPSEGSAPGSPAGSPT | |
| | STEEGTSTEPSEGSAPGTSTEPSEGSAPGTSESATPESGPGTSTEPSEGSAPGTSES | |
| | ATPESGPGSEPATSGSETPGTSTEPSEGSAPGTSTEPSEGSAPGTSESATPESGPG | |
| | TSESATPESGPGSPAGSPTSTEEGTSESATPESGPGSEPATSGSETPGTSESATPES | |
| | GPGTSTEPSEGSAPGTSTEPSEGSAPGTSTEPSEGSAPGTSTEPSEGSAPGTSTEP | |
| | SEGSAPGTSTEPSEGSAPGSPAGSPTSTEEGTSTEPSEGSAPGTSESATPESGPGS | |
| | EPATSGSETPGTSESATPESGPGSEPATSGSETPGTSESATPESGPGTSTEPSEGS | |
| | APGTSESATPESGPGSPAGSPTSTEEGSPAGSPTSTEEGSPAGSPTSTEEGTSESA | |
| | TPESGPGTSTEPSEGSAPGTSESATPESGPGSEPATSGSETPGTSESATPESGPGS | |
| | EPATSGSETPGTSESATPESGPGTSTEPSEGSAPGSPAGSPTSTEEGTSESATPES | |
| | GPGSEPATSGSETPGTSESATPESGPGSPAGSPTSTEEGSPA | |
| Seg | GSPGAGSCAGSPTSTEEGTSESACSPEGPGTSTEPSEGSCGGLAGRSDNHSPLGL | 394 |
| 233 | AGSPGSPAGSPTSTEEGTSESATPESGPGTSTEPSEGSAPGSPAGSPTSTEEGTST | |
| | EPSEGSAPGTSTEPSEGSAPGTSESATPESGPGSEPATSGSETPGSEPATSGSETP | |
| | GSPAGSPTSTEEGTSESATPESGPGTSTEPSEGSAPGTSTEPSEGSAPGSPAGSPT | |
| | STEEGTSTEPSEGSAPGTSTEPSEGSAPGTSESATPESGPGTSTEPSEGSAPGTSES | |
| | ATPESGPGSEPATSGSETPGTSTEPSEGSAPGTSTEPSEGSAPGTSESATPESGPG | |
| | TSESATPESGPGSPAGSPTSTEEGTSESATPESGPGSEPATSGSETPGTSESATPES | |
| | GPGTSTEPSEGSAPGTSTEPSEGSAPGTSTEPSEGSAPGTSTEPSEGSAPGTSTEP | |
| | SEGSAPGTSTEPSEGSAPGSPAGSPTSTEEGTSTEPSEGSAPGTSESATPESGPGS | |
| | EPATSGSETPGTSESATPESGPGSEPATSGSETPGTSESATPESGPGTSTEPSEGS | |
| | APGTSESATPESGPGSPAGSPTSTEEGSPAGSPTSTEEGSPAGSPTSTEEGTSESA | |
| | TPESGPGTSTEPSEGSAPGTSESATPESGPGSEPATSGSETPGTSESATPESGPGS | |
| | EPATSGSETPGTSESATPESGPGTSTEPSEGSAPGSPAGSPTSTEEGTSESATPES | |
| | GPGSEPATSGSETPGTSESATPESGPGSPAGSPTSTEEGSPA | |
| Seg | GSPGAGSCAGSPTSTEEGTSESACSPEGPGTSTEPSEGSCGGSPLGLAGSLSGRS | 395 |
| 234 | DNHPGSPAGSPTSTEEGTSESATPESGPGTSTEPSEGSAPGSPAGSPTSTEEGTST | |
| | EPSEGSAPGTSTEPSEGSAPGTSESATPESGPGSEPATSGSETPGSEPATSGSETP | |
| | GSPAGSPTSTEEGTSESATPESGPGTSTEPSEGSAPGTSTEPSEGSAPGSPAGSPT | |
| | STEEGTSTEPSEGSAPGTSTEPSEGSAPGTSESATPESGPGTSTEPSEGSAPGTSES | |
| | ATPESGPGSEPATSGSETPGTSTEPSEGSAPGTSTEPSEGSAPGTSESATPESGPG | |
| | TSESATPESGPGSPAGSPTSTEEGTSESATPESGPGSEPATSGSETPGTSESATPES | |
| | GPGTSTEPSEGSAPGTSTEPSEGSAPGTSTEPSEGSAPGTSTEPSEGSAPGTSTEP | |
| | SEGSAPGTSTEPSEGSAPGSPAGSPTSTEEGTSTEPSEGSAPGTSESATPESGPGS | |
| | EPATSGSETPGTSESATPESGPGSEPATSGSETPGTSESATPESGPGTSTEPSEGS | |
| | APGTSESATPESGPGSPAGSPTSTEEGSPAGSPTSTEEGSPAGSPTSTEEGTSESA | |
| | TPESGPGTSTEPSEGSAPGTSESATPESGPGSEPATSGSETPGTSESATPESGPGS | |
| | EPATSGSETPGTSESATPESGPGTSTEPSEGSAPGSPAGSPTSTEEGTSESATPES | |
| | GPGSEPATSGSETPGTSESATPESGPGSPAGSPTSTEEGSPA | |
| Seg | GAPCGAGCAGPCGPLAGRSDNHSPLGLAGSPGSPAGSPTSTEEGTSESATPESG | 396 |
| 235 | PGTSTEPSEGSAPGSPAGSPTSTEEGTSTEPSEGSAPGTSTEPSEGSAPGTSESAT | |
| | PESGPGSEPATSGSETPGSEPATSGSETPGSPAGSPTSTEEGTSESATPESGPGTS | |
| | TEPSEGSAPGTSTEPSEGSAPGSPAGSPTSTEEGTSTEPSEGSAPGTSTEPSEGSA | |
| | PGTSESATPESGPGTSTEPSEGSAPGTSESATPESGPGSEPATSGSETPGTSTEPSE | |
| | GSAPGTSTEPSEGSAPGTSESATPESGPGTSESATPESGPGSPAGSPTSTEEGTSE | |
| | SATPESGPGSEPATSGSETPGTSESATPESGPGTSTEPSEGSAPGTSTEPSEGSAP | |
| | GTSTEPSEGSAPGTSTEPSEGSAPGTSTEPSEGSAPGTSTEPSEGSAPGSPAGSPT | |
| | STEEGTSTEPSEGSAPGTSESATPESGPGSEPATSGSETPGTSESATPESGPGSEP | |
| | ATSGSETPGTSESATPESGPGTSTEPSEGSAPGTSESATPESGPGSPAGSPTSTEE | |
| | GSPAGSPTSTEEGSPAGSPTSTEEGTSESATPESGPGTSTEPSEGSAPGTSESATP | |
| | ESGPGSEPATSGSETPGTSESATPESGPGSEPATSGSETPGTSESATPESGPGTST | |
| | EPSEGSAPGSPAGSPTSTEEGTSESATPESGPGSEPATSGSETPGTSESATPESGP | |
| | GSPAGSPTSTEEGSPA | |
| Seg | GAPCGAGCAGPCGPLAGRSDNHSPLGLAGSPGSPAGSPTSTEEGTSESATPESG | 397 |
| 236 | PGTSTEPSEGSAPGSPAGSPTSTEEGTSTEPSEGSAPGTSTEPSEGSAPGTSESAT | |
| | PESGPGSEPATSGSETPGSEPATSGSETPGSPAGSPTSTEEGTSESATPESGPGTS | |
| | TEPSEGSAPG | |
| Seg | GSPGAGSCAGSPTSTEEGTSESACSPEGPGTSTEPSEGSCGGPGSPAGSPTSTEE | 398 |
| 237 | GTSESATPESGPGTSTEPSEGSAPGSPAGSPTSTEEGTSTEPSEGSAPGTSTEPSE | |
| | GSAPGTSESATPESGPGSEPATSGSETPGSEPATSGSETPGSPAGSPTSTEEGTSE | |
| | SATPESGPGTSTEPSEGSAPGTSTEPSEGSAPGSPAGSPTSTEEGTSTEPSEGSAP | |
| | GTSTEPSEGSAPGTSESATPESGPGTSTEPSEGSAPGTSESATPESGPGSEPATSG | |
| | SETPGTSTEPSEGSAPGTSTEPSEGSAPGTSESATPESGPGTSESATPESGPGSPA | |
| | GSPTSTEEGTSESATPESGPGSEPATSGSETPGTSESATPESGPGTSTEPSEGSAP | |
| | GTSTEPSEGSAPGTSTEPSEGSAPGTSTEPSEGSAPGTSTEPSEGSAPGTSTEPSE | |
| | GSAPGSPAGSPTSTEEGTSTEPSEGSAPGTSESATPESGPGSEPATSGSETPGTSE | |
| | SATPESGPGSEPATSGSETPGTSESATPESGPGTSTEPSEGSAPGTSESATPESGP | |
| | GSPAGSPTSTEEGSPAGSPTSTEEGSPAGSPTSTEEGTSESATPESGPGTSTEPSE | |
| | GSAPGTSESATPESGPGSEPATSGSETPGTSESATPESGPGSEPATSGSETPGTSE | |
| | SATPESGPGTSTEPSEGSAPGSPAGSPTSTEEGTSESATPESGPGSEPATSGSETP | |
| | GTSESATPESGPGSPAGSPTSTEEGSPAGSPTSTEEGTSTEPSEGSAPGTSESATP | |
| | ESGPGTSESATPESGPGTSESATPESGPGSEPATSGSETPGSEPATSGSETPGSPA | |
| | GSPTSTEEGTSTEPSEGSAPGSASR | |
| Seg | GSPGATGCGSEPATSGSETPGTSESATPESGPGSEPATSGSETPGTSESATPESGP | 399 |
| 238 | GTSTEPSEGSAPGSPAGSPTSTEEGTSESATPESGPGSEPATSGSETPGTSESATP | |
| | ESGPGSPAGSPTSTEEGSPAGSPTSTEEGTSTEPSEGSAPGTSESATPESGPGTSE | |
| | SATPESGPGTSESATPESGPGSEPATSGSETPGSEPATSGSETPGSPAGSPTSTEE | |
| | GTSTEPSEGSAPGTSTEPSEGSAPGSEPATSGSETPGTSESATPESGPGTSTEPSE | |
| | GSAPSASR | |
| Seg | GSPGAGSCAGSPTSTEEGTSESACSPEGPGTSTEPSEGSCGGLAGRSDNHVPLSL | 400 |
| 239 | SMGPGSPAGSPTSTEEGTSESATPESGPGTSTEPSEGSAPGSPAGSPTSTEEGTST | |
| | EPSEGSAPGTSTEPSEGSAPGTSESATPESGPGSEPATSGSETPGSEPATSGSETP | |
| | GSPAGSPTSTEEGTSESATPESGPGTSTEPSEGSAPGTSTEPSEGSAPGSPAGSPT | |
| | STEEGTSTEPSEGSAPGTSTEPSEGSAPGTSESATPESGPGTSTEPSEGSAPGTSES | |
| | ATPESGPGSEPATSGSETPGTSTEPSEGSAPGTSTEPSEGSAPGTSESATPESGPG | |
| | TSESATPESGPGSPAGSPTSTEEGTSESATPESGPGSEPATSGSETPGTSESATPES | |
| | GPGTSTEPSEGSAPGTSTEPSEGSAPGTSTEPSEGSAPGTSTEPSEGSAPGTSTEP | |
| | SEGSAPGTSTEPSEGSAPGSPAGSPTSTEEGTSTEPSEGSAPGTSESATPESGPGS | |
| | EPATSGSETPGTSESATPESGPGSEPATSGSETPGTSESATPESGPGTSTEPSEGS | |
| | APGTSESATPESGPGSPAGSPTSTEEGSPAGSPTSTEEGSPAGSPTSTEEGTSESA | |
| | TPESGPGTSTEPSEGSAPGTSESATPESGPGSEPATSGSETPGTSESATPESGPGS | |
| | EPATSGSETPGTSESATPESGPGTSTEPSEGSAPGSPAGSPTSTEEGTSESATPES | |
| | GPGSEPATSGSETPGTSESATPESGPGSPAGSPTSTEEGSPA | |

[0264] In another aspect, the disclosure provides several XTEN linkers of defined lengths containing a single cysteine residue designed to be incorporated into a fusion protein at the C-terminus of a targeting moiety to permit conjuation of a cross-linker and the resulting TM-linker to the N-terminus of a CCD, the N-terminus of an XTEN, or to a cysteine residue of a cysteine-engineered XTEN of Table 11. The introduction of a reactive thiol that is utilized for conjugation of the targeting moiety to the CCD or to other XTEN (hence, their role as linkers), permits an alternative to creating a single fusion protein comprising the targeting moiety fused to the polypeptide components of the subject targeted conjugate compositions; i.e., the CCD, the PCM and the XTEN. In some cases, the XTEN linkers are designed with H8 tags (SEQ ID NO: 721) to permit recovery of the targeting moiety-linker fusion protein during the processing of the compositions. Non-limiting examples of the XTEN linkers are provided in Table 12, and exemplarly targeted conjugate constructs comprising such targeting moiety-linkers are presented in the Examples, below.

TABLE 12
Cysteine-containing linkers

| Name | | SEQ |
|---|---|---|
| of Cys | | ID |
| Linker | Amino Acid Sequence | NO. |
| X304H8 | GSPGTSESATPESGPGSEPATSGSETPGTSESATPESGPGSEPATSGSETPGTSE | 401 |
| | SATPESGPGTSTEPSEGSAPGSPAGSPTSTEEGTSESATPESGPGSEPATSGSET | |
| | PGTSESATPESGPGSPAGSPTSTEEGSPAGSPTSTEEGTSTEPSEGSAPGTSESA | |
| | TPESGPGTSESATPESGPGTSESATPESGPGSEPATSGSETPGSEPATSGSETPG | |
| | SPAGSPTSTEEGTSTEPSEGSAPGTSTEPSEGSAPGSEPATSGSETPGTSESATP | |
| | ESGPGTSTEPSEGSAPGGAPCGPAGGSSSHHHHHHHH | |
| X304 | GSPGTSESATPESGPGSEPATSGSETPGTSESATPESGPGSEPATSGSETPGTSE | 402 |
| | SATPESGPGTSTEPSEGSAPGSPAGSPTSTEEGTSESATPESGPGSEPATSGSET | |
| | PGTSESATPESGPGSPAGSPTSTEEGSPAGSPTSTEEGTSTEPSEGSAPGTSESA | |
| | TPESGPGTSESATPESGPGTSESATPESGPGSEPATSGSETPGSEPATSGSETPG | |
| | SPAGSPTSTEEGTSTEPSEGSAPGTSTEPSEGSAPGSEPATSGSETPGTSESATP | |
| | ESGPGTSTEPSEGSAPGGAPCGPAGGSSS | |
| X44H8 | GSPGSAGSGSETPGTSESATPESGPGTSTEPSGAPCGPAGGSSSHHHHHHHH | 403 |
| X44 | GSPGSAGSGSETPGTSESATPESGPGTSTEPSGAPCGPAGGSSS | 404 |
| X36H8 | PSEGSAPGSEPATSGSETPGSTAEAAGCGTAEAASAHHHHHHHH | 405 |
| X36 | PSEGSAPGSEPATSGSETPGSTAEAAGCGTAEAASA | 406 |
| X24H8 | TSGSETPGSTAEAAGCGTAEAASAHHHHHHHH | 407 |
| X24 | TSGSETPGSTAEAAGCGTAEAASA | 408 |
| X12H8 | GSTAEAAGCGTAHHHHHHHH | 409 |
| X12 | GSTAEAAGCGTA | 410 |
| CiH8 | GCGHHHHHHHH | 411 |
| Ci | GCG | |

[0265] The design, selection, and preparative methods of the invention enable the creation of engineered XTEN that are reactive with electrophilic functionality. The methods to make the subject conjugates provided herein enable the creation of targeted conjugate compositions wherein the payload or targeting moiety molecules are added in a quantified fashion at designated sites. Payloads, targeting moieties and other XTEN may be site-specifically and efficiently linked to the N- or C-terminus of CCD, XTEN, to cysteine-engineered XTEN with a thiol-reactive reagent, or to lysine-engineered XTEN of the disclosure with an amine-reactive reagent, and to an alpha amino group at the N-terminus of a CCD or XTEN, as described more fully, below, and then are purified and characterized using, for example, the non-limiting methods described more specifically in the Examples.

### 4. Length of Sequence

[0266] In another aspect, the invention provides XTEN of varying lengths for incorporation into the compositions wherein the length of the XTEN sequence(s) are chosen based on the property or function to be achieved in the composition. For example, XTEN are used as a carrier in the compositions, the invention taking advantage of the discovery that increasing the length of the non-repetitive, unstructured polypeptides enhances the unstructured nature of the XTENs and correspondingly enhances the physicochemical and pharmacokinetic properties of constructs comprising the XTEN carrier. In general, XTEN as monomers or as multimers with cumulative lengths longer that about 400 residues incorporated into the compositions result in longer half-life compared to shorter cumulative lengths, e.g., shorter than about 280 residues. As described more fully in the Examples, proportional increases in the length of the XTEN, even if created by a repeated order of single family sequence motifs (e.g., the four AE motifs of Table 9), result in a sequence with a higher percentage of random coil formation, as determined by GOR algorithm, or reduced content of alpha-helices or beta-sheets, as determined by Chou-Fasman algorithm, compared to shorter XTEN lengths. In addition, increasing the length of the unstructured polypeptide fusion partner, as described in the Examples, results in a construct with a disproportionate increase in terminal half-life compared to polypeptides with unstructured polypeptide partners with shorter sequence lengths. In some embodiments, where the XTEN serve primarily as a carrier, the invention encompasses targeted conjugate compositionscomprising two, three, four or more XTEN wherein the cumulative XTEN sequence length of the XTEN proteins is greater than about 100, 200, 400, 500, 600, 800, 900, or 1000 to about 3000 amino acid residues, wherein the construct exhibits enhanced pharmacokinetic properties when administered to a subject compared to a payload not linked to the XTEN and administered at a comparable dose. In one embodiment of the foregoing, the two or more XTEN sequences each exhibit at least about 80%, 90%, 91%, 92%, 93%, 94%, 95%, 96%, 97%, or 98% or more identity to a sequence selected from any one of Table 10, Table 11, and the remainder, if any, of the carrier sequence(s) contains at least 90% hydrophilic amino acids and less than about 2% of the overall sequence consists of hydrophobic or aromatic amino acids or cysteine. The enhanced pharmacokinetic properties of the targeted conjugate composition, in comparison to payload not linked to the composition, are described more fully, below.

### 5. Net Charge

[0267] In other embodiments, the XTEN polypeptides have an unstructured characteristic imparted by incorporation of amino acid residues with a net charge and containing a low percentage or no hydrophobic amino acids in the XTEN sequence. The overall net charge and net charge density is controlled by modifying the content of charged amino acids in the XTEN sequences, either positive or negative, with the net charge typically represented as the percentage of amino acids in the polypeptide contributing to a charged state beyond those residues that are cancelled by a residue with an opposing charge. In some embodiments, the net charge density of the XTEN of the conjugates may be above +0.1 or below −0.1 charges/residue. By “net charge density” of a protein or peptide herein is meant the net charge divided by the total number of amino acids in the protein. In other embodiments, the net charge of an XTEN can be about 0%, about 1%, about 2%, about 3%, about 4%, about 5%, about 6%, about 7%, about 8%, about 9%, about 10% about 11%, about 12%, about 13%, about 14%, about 15%, about 16%, about 17%, about 18%, about 19%, or about 20% or more. Based on the net charge, some XTENs have an isoelectric point (pI) of 1.0, 1.5, 2.0, 2.5, 3.0, 3.5, 4.0, 4.5, 5.0, 5.5, 6.0, or even 6.5. In one embodiment, the XTEN will have an isoelectric point between 1.5 and 4.5 and carry a net negative charge under physiologic conditions.

[0268] Since most tissues and surfaces in a human or animal have a net negative charge, in some embodiments the XTEN sequences are designed to have a net negative charge to minimize non-specific interactions between the XTEN containing compositions and various surfaces such as blood vessels, healthy tissues, or various receptors. Not to be bound by a particular theory, an XTEN can adopt open conformations due to electrostatic repulsion between individual amino acids of the XTEN polypeptide that individually carry a net negative charge and that are distributed across the sequence of the XTEN polypeptide. In some embodiments, the XTEN sequence is designed with at least 90% to 95% of the charged residues separated by other non-charged residues such as serine, alanine, threonine, proline or glycine, which leads to a more uniform distribution of charge, better expression or purification behavior. Such a uniform distribution of net negative charge in the extended sequence lengths of XTEN also contributes to the unstructured conformation of the polymer that, in turn, can result in an effective increase in hydrodynamic radius. In preferred embodiments, the negative charge of the subject XTEN is conferred by incorporation of glutamic acid residues. Generally, the glutamic residues are spaced uniformly across the XTEN sequence. In some cases, the XTEN can contain about 10-80, or about 15-60, or about 20-50 glutamic residues per 20 kDa of XTEN that can result in an XTEN with charged residues that would have very similar pKa, which can increase the charge homogeneity of the product and sharpen its isoelectric point, enhance the physicochemical properties of the resulting targeted conjugate composition for, and hence, simplifying purification procedures. For example, where an XTEN with a negative charge is desired, the XTEN can be selected solely from an AE family sequence, which has approximately a 17% net charge due to incorporated glutamic acid, or can include varying proportions of glutamic acid-containing motifs of Table 9 to provide the desired degree of net charge. In one embodiment, an XTEN sequence of Table 10 can be modified to include additional glutamic acid residues to achieve the desired net negative charge. Accordingly, in one embodiment the invention provides XTEN in which the XTEN sequences contain about 1%, 2%, 4%, 8%, 10%, 15%, 17%, 20%, 25%, or even about 30% glutamic acid. In some cases, the XTEN can contain about 10-80, or about 15-60, or about 20-50 glutamic residues per 20kDa of XTEN that can result in an XTEN with charged residues that would have very similar pKa, which can increase the charge homogeneity of the product and sharpen its isoelectric point, enhance the physicochemical properties of the resulting XTEN conjugate composition, and hence, simplifying purification procedures. In one embodiment, the invention contemplates incorporation of up to 5% aspartic acid residues into XTEN in addition to glutamic acid in order to achieve a net negative charge.

[0269] Not to be bound by a particular theory, the XTEN of the targeted conjugate compositions with the higher net negative charge are expected to have less non-specific interactions with various negatively-charged surfaces such as blood vessels, tissues, or various receptors, which would further contribute to reduced active clearance. Conversely, it is believed that the XTEN of the targeted conjugate compositions with a low (or no) net charge would have a higher degree of interaction with surfaces that can potentiate the activity of the associated conjugate in the vasculature or tissues.

[0270] In other embodiments, where no net charge is desired, the XTEN can be selected from, for example, AG XTEN components, such as the AG motifs of Table 9 that have no net charge. In another embodiment, the XTEN can comprise varying proportions of AE and AG motifs in order to have a net charge that is deemed optimal for a given use or to maintain a given physicochemical property.

[0271] The XTEN of the compositions of the present invention generally have no or a low content of positively charged amino acids. In some embodiments, the XTEN may have less than about about 5%, or less than about 2%, or less than about 1% amino acid residues with a positive charge. However, the invention contemplates constructs where a defined number of amino acids with a positive charge, such as lysine, are incorporated into XTEN to permit conjugation between the epsilon amine of the lysine and a reactive group on a payload or a cross-linker to be conjugated to the XTEN backbone. In one embodiment of the foregoing, the XTEN of the subject conjugates has between about 1 to about 10 lysine residues, or about 1 to about 5 lysine residues, or about 1 to about 3 lysine residues, or alternatively only a single lysine residue. Using the foregoing lysine-containing XTEN, conjugates can be constructed that comprise a targeting moiety, or a payload useful in the treatment of a condition in a subject wherein the maximum number of molecules of the payload agent linked to the XTEN component is determined by the numbers of lysines with a reactive side group (e.g., a terminal amine) incorporated into the XTEN.

### 6. Low Immunogenicity

[0272] In another aspect, the invention provides XTEN compositions having a low degree of immunogenicity or are substantially non-immunogenic. Several factors can contribute to the low immunogenicity of XTEN, e.g., the non-repetitive sequence, the unstructured conformation, the high degree of solubility, the low degree or lack of self-aggregation, the low degree or lack of proteolytic sites within the sequence, and the low degree or lack of epitopes in the XTEN sequence.

[0273] Conformational epitopes are formed by regions of the protein surface that are composed of multiple discontinuous amino acid sequences of the protein antigen. The precise folding of the protein brings these sequences into a well-defined, stable spatial configurations, or epitopes, that can be recognized as “foreign” by the host humoral immune system, resulting in the production of antibodies to the protein or the activation of a cell-mediated immune response. In the latter case, the immune response to a protein in an individual is heavily influenced by T-cell epitope recognition that is a function of the peptide binding specificity of that individual's HLA-DR allotype. Engagement of a MHC Class II peptide complex by a cognate T-cell receptor on the surface of the T-cell, together with the cross-binding of certain other co-receptors such as the CD4 molecule, can induce an activated state within the T-cell. Activation leads to the release of cytokines further activating other lymphocytes such as B cells to produce antibodies or activating T killer cells as a full cellular immune response.

[0274] The ability of a peptide to bind a given MHC Class II molecule for presentation on the surface of an APC (antigen presenting cell) is dependent on a number of factors; most notably its primary sequence. In one embodiment, a lower degree of immunogenicity is achieved by designing XTEN sequences that resist antigen processing in antigen presenting cells, and/or choosing sequences that do not bind MHC receptors well. The invention provides substantially non-repetitive XTEN polypeptides designed to reduce binding with MHC II receptors, as well as avoiding formation of epitopes for T-cell receptor or antibody binding, resulting in a low degree of immunogenicity. Avoidance of immunogenicity can attribute to, at least in part, a result of the conformational flexibility of XTEN sequences; i.e., the lack of secondary structure due to the selection and order of amino acid residues. For example, of particular interest are sequences having a low tendency to adapt compactly folded conformations in aqueous solution or under physiologic conditions that could result in conformational epitopes. The administration of polypeptides comprising XTEN, using conventional therapeutic practices and dosing, would generally not result in the formation of neutralizing antibodies to the XTEN sequence, and also reduce the immunogenicity of the payload in the conjugates.

[0275] In one embodiment, the XTEN sequences utilized in the subject polypeptides can be substantially free of epitopes recognized by human T cells. The elimination of such epitopes for the purpose of generating less immunogenic proteins has been disclosed previously; see for example WO 98/52976, WO 02/079232, and WO 00/3317 which are incorporated by reference herein. Assays for human T cell epitopes have been described (Stickler, M., et al. (2003) J Immunol Methods, 281: 95-108). Of particular interest are peptide sequences that can be oligomerized without generating T cell epitopes or non-human sequences. This is achieved by testing direct repeats of these sequences for the presence of T-cell epitopes and for the occurrence of 6 to 15-mer and, in particular, 9-mer sequences that are not human, and then altering the design of the XTEN sequence to eliminate or disrupt the epitope sequence. In some embodiments, the XTEN sequences are substantially non-immunogenic by the restriction of the numbers of epitopes of the XTEN predicted to bind MHC receptors. With a reduction in the numbers of epitopes capable of binding to MHC receptors, there is a concomitant reduction in the potential for T cell activation as well as T cell helper function, reduced B cell activation or upregulation and reduced antibody production. The low degree of predicted T-cell epitopes can be determined by epitope prediction algorithms such as, e.g., TEPITOPE (Sturniolo, T., et al. (1999) Nat Biotechnol, 17: 555-61). The TEPITOPE score of a given peptide frame within a protein is the log of the K_{d} (dissociation constant, affinity, off-rate) of the binding of that peptide frame to multiple of the most common human MHC alleles, as disclosed in Sturniolo, T. et al. (1999) Nature Biotechnology 17:555). The score ranges over at least 20 logs, from about 10 to about −10 (corresponding to binding constraints of 10e¹⁰ K_{d} to 10e⁻¹⁰ K_{d}), and can be reduced by avoiding hydrophobic amino acids that serve as anchor residues during peptide display on MHC, such as M, I, L, V, F. In some embodiments, an XTEN component incorporated into a targeted conjugate composition does not have a predicted T-cell epitope at a TEPITOPE threshold score of about −5, or −6, or −7, or −8, or −9, or at a TEPITOPE score of −10. As used herein, a score of “−9” is a more stringent TEPITOPE threshold than a score of −5.

### 7. Increased Hydrodynamic Radius

[0276] In another aspect, a subject XTEN useful as a fusion partner has a high hydrodynamic radius; a property that confers a corresponding increased apparent molecular weight to the targeted conjugate composition compared to the payload without the XTEN. As detailed in Example 44, the linking of XTEN to therapeutic protein sequences results in compositions that can have increased hydrodynamic radii, increased apparent molecular weight, and increased apparent molecular weight factor compared to a therapeutic protein not linked to an XTEN. For example, in therapeutic applications in which prolonged half-life is desired, compositions in which one or more XTEN with a high hydrodynamic radius are fused or linked to a targeted conjugate composition can effectively enlarge the hydrodynamic radius of the composition beyond the glomerular pore size of approximately 3-5 nm (corresponding to an apparent molecular weight of about 70 kDa) (Caliceti. 2003. Pharmacokinetic and biodistribution properties of poly(ethylene glycol)-protein conjugates. Adv Drug Deliv Rev 55:1261-1277), resulting in reduced renal clearance of circulating proteins with a corresponding increase in terminal half-life and other enhanced pharmacokinetic properties. The hydrodynamic radius of a protein is conferred by its molecular weight as well as by its structure, including shape or compactness. Not to be bound by a particular theory, the XTEN can adopt open conformations due to the electrostatic repulsion between individual charges of incorporated charged residues in the XTEN as well as because of the inherent flexibility imparted by the particular amino acids in the sequence that lack potential to confer secondary structure. The open, extended and unstructured conformation of the XTEN polypeptide has a greater proportional hydrodynamic radius compared to polypeptides of a comparable sequence length and/or molecular weight that have secondary or tertiary structure, such as typical globular proteins. Methods for determining the hydrodynamic radius are well known in the art, such as by the use of size exclusion chromatography (SEC), as described in U.S. Pat. Nos. 6,406,632 and 7,294,513. Example 51 demonstrates that increases in XTEN length result in proportional increase in the hydrodynamic radius, apparent molecular weight, and/or apparent molecular weight factor to proteins to which they are attached, including scFv, and thus permit the tailoring of a targeted conjugate composition to desired cut-off values of apparent molecular weights or hydrodynamic radii. Accordingly, in certain embodiments, the targeted conjugate composition can be configured with an XTEN such that the resulting composition can have a hydrodynamic radius of at least about 5 nm, or at least about 8 nm, or at least about 10 nm, or about 12 nm, or about 15 nm, or about 20 nm, or about 30 nm or more. As detailed in Example 44, for instance, a scFv of anti-Her2 linked directly to XTEN (without the other components of the CCD and PCM) having 288, 576, or 864 amino acid residues resulted in a determined hydrodynamic radius of 6.7, 8.6, and 9.9; all of which are larger than the known pore size of a renal tubule. In the foregoing embodiments, the large hydrodynamic radius conferred by the XTEN in a targeted conjugate composition can lead to reduced clearance of the resulting conjugate, an increase in terminal half-life, and an increase in mean residence time. As described in the Examples, when the molecular weights of the XTEN-containing compositions are derived from size exclusion chromatography analyses, the open conformation of the XTEN due to the low degree of secondary structure results in an increase in the apparent molecular weight of the conjugates into which they are incorporated. In one embodiment, the present invention makes use of the discovery that the increase in apparent molecular weight can be accomplished by the linking not only of a single XTEN of a given length, but also by the linking of 2, 3, 4 or more XTEN of proportionally shorter lengths, either in linear fashion or as a trimeric or tetrameric, branched configuration, as described more fully, below, and as illustrated in the drawings. In some embodiments, the XTEN comprising a payload and one or more XTEN exhibits an apparent molecular weight of at least about 400 kD, or at least about 500 kD, or at least about 700 kD, or at least about 1000 kD, or at least about 1400 kD, or at least about 1600 kD, or at least about 1800 kD, or at least about 2000 kD. Accordingly, the targeted conjugate composition exhibits an apparent molecular weight that is about 1.3-fold greater, or about 2-fold greater, or about 3-fold greater or about 4-fold greater, or about 8-fold greater, or about 10-fold greater, or about 12-fold greater, or about 15-fold, or about 20-fold greater than the actual molecular weight of the composition. In one embodiment, the isolated targeted conjugate composition of any of the embodiments disclosed herein exhibit an apparent molecular weight factor under physiologic conditions that is greater than about 1.3, or about 2, or about 3, or about 4, or about 5, or about 6, or about 7, or about 8, or about 10, or greater than about 15. In another embodiment, the targeted conjugate composition has, under physiologic conditions, an apparent molecular weight factor that is about 3 to about 20, or is about 5 to about 15, or is about 8 to about 12, or is about 9 to about 10 relative to the actual molecular weight of the composition. Generally, the increased apparent molecular weight of the subject targeted conjugate compositions enhances the pharmacokinetic properties of the composition by a combination of factors, which include reduced active clearance, reduced renal clearance, and reduced loss through capillary and venous junctions.

### 8. Compositions for Increased Expression of XTEN

[0277] In another aspect, the invention provides constructs comprising polynucleic acid sequences encoding the fusion proteins of the subject constructs and methods of making the constructs in which additional encoding polynucleotide helper sequences are added to the 5′ end of polynucleotides encoding the fusion proteins or are added to the 5′ end of sequences encoding the fusion protein portion of the subject compositions to enhance and facilitate the expression of the fusion proteins in transformed host cells, such as bacteria. Examples of such encoded helper sequences are given in Table 13 and in the Examples. In one embodiment, the invention provides a polynucleotide sequence construct encoding a polypeptide comprising a helper sequence having at least about 90% sequence identity to a sequence selected from Table 13 linked to the N-terminus of a fusion protein portion of a targeted conjugate composition described herein. The invention provides expression vectors encoding the constructs useful in methods to produce substantially homogeneous preparations of polypeptides and XTEN at high expression levels. In some embodiments, the invention provides methods for producing a substantially homogenous population of polypeptides comprising the fusion protein portion of a targeted conjugate composition, the method comprising culturing in a fermentation reaction a host cell that comprises a vector encoding a polypeptide comprising a helper sequence (wherein the helper sequence has at least 90%sequence identity to a sequence set forth in Table 13) fused to a fusion protein sequence under conditions effective to express the polypeptide such that more than about 2 g/L, or more than about 3 g/L, or more than about 4 g/L, or more than about 5 g/L, or more than about 6 g/L, or more than about 7 grams per liter (7 g/L) of the polypeptide is produced as a component of a crude expression product of the host cell when the fermentation reaction reaches an optical density of at least 130 at a wavelength of 600 nm. In one embodiment, the method further comprises the steps of adsorbing the polypeptide onto a first chromatography substrate under conditions effective to capture an affinity tag of the polypeptide onto the chromatography substrate; eluting and recovering the polypeptide; adsorbing the polypeptide onto a second chromatography substrate under conditions effective to capture the second affinity tag (if present) of the polypeptide onto the chromatography substrate; eluting the polypeptide; and recovering the substantially homogeneous polypeptide preparation. In other embodiments, the invention provides methods for producing a substantially homogenous population of polypeptides comprising a fusion protein of the subject compositions described herein and a first and a second affinity tag and a helper sequence, the method comprising culturing in a fermentation reaction a host cell that comprises a vector encoding a polypeptide comprising an XTEN and the first and second affinity tag under conditions effective to express the polypeptide product at a concentration of more than about 10 milligrams/gram of dry weight host cell (mg/g), or at least about 15 mg/g, or at least about 20 mg/g, or at least about 25 mg/g, or at least about 30 mg/g, or at least about 40 mg/g, or at least about 50 mg/g of said polypeptide when the fermentation reaction reaches an optical density of at least 130 at a wavelength of 600 nm. In one embodiment of the foregoing, the method further comprises the steps of adsorbing the polypeptide onto a first chromatography substrate under conditions effective to capture the first affinity tag of the polypeptide onto the chromatography substrate; eluting and recovering the polypeptide; adsorbing the polypeptide onto a second chromatography substrate under conditions effective to capture the second affinity tag of the polypeptide onto the chromatography substrate; eluting the polypeptide; and recovering the substantially homogeneous polypeptide preparation.

TABLE 13
Examples of helper sequences to facilitate protein
expression, secretion and processing in bacteria

| | SEQ ID |
|---|---|
| Amino Acid Sequence | NO: |
| KNPEQAEEQREET | 412 |
| KNPEQAEEQSEET | 413 |
| KNPEQAEEQAEEQREET | 414 |
| KNPEQAEEQAEEQSEET | 415 |
| KNHEQAEEQAEEQSEET | 416 |
| KKHEQAEEQAEEQSEET | 417 |
| KKPEQAEEQAEEQREET | 418 |
| KNHEQEKEKAEEQSEET | 419 |
| KKQEQEEKKAEEQREET | 420 |
| KNHEKDEKKAEEQSEET | 421 |
| KKQEQEKEQAEEQREET | 422 |
| KNPEQEKEKAEEQREET | 423 |
| KKPEQEEKQAEEQREET | 424 |
| KKQEQEKEQAEEQAESEREET | 425 |
| KKQEQEKEQAEEQSQSQREET | 426 |
| KKQEQEKEQAEEQSESEREET | 427 |
| KKQEQEKEQAEEQAKAESEAEREET | 428 |
| KKQEQEKEQAEEQSKSQAEAEREET | 429 |
| KKQEQEKEQAEEQAQAQAEDEREET | 430 |
| KKQEQEKEQAEEQSKSKAEDEREET | 431 |

### IV). Payloads

[0278] The present invention relates in part to targeted conjugate compositions comprising one or more payload molecules. It is contemplated that subject compositions can be linked to a broad diversity of payload molecules, including biologically active peptides, proteins, pharmacologically active small-molecules, and imaging small-molecule payloads, as well as combinations of these types of payloads resulting in compositions with 1, 2, 3, 4 or more types of payloads. More particularly, the active payload may fall into one of a number of structural classes, including but not limited to small molecule drugs, biologically active proteins (peptides, polypeptides, proteins, recombinant proteins, antibodies, and glycoproteins), steroids, and the like. In some embodiments, the invention addresses a long-felt need in both increasing the terminal half-life of exogenously administered therapeutic and diagnostic payloads as well as improving the therapeutic index and reducing side effects and damage caused by such payloads to healthy tissues in a subject in need thereof.

[0279] Non-limiting examples of functional classes of pharmacologically active payload agents for use in linking to subject composition of the invention may be any one or more of the following: anti-inflammatories, anti-cancer agents, cytotoxic drugs, neoplastics, antineoplastics, diagnostic agents, contrasting agents, and radioactive imaging agents. In some preferred embodiments, the payloads are cytotoxic or anti-cancer agents, including but not limited one or more drugs and/or biologics selected from the group consisting of the drugs set forth in Tables 14-17. In other preferred embodiments, the payloads are anti-inflammatory agents, including but not limited to one or more drugs selected from the group consisting of the drugs set forth in Table 17.

[0280] For the targeted conjugate composition, it is specifically contemplated that a payload can be a pharmacologically active agent that possesses a suitably reactive functional group, including, but not limited to a native amino group, a sulfydryl group, a carboxyl group, an aldehyde group, a ketone group, an alkene group, an alkyne group, an azide group, an alcohol group, a heterocycle, or, alternatively, is modified to contain at least one of the foregoing reactive groups suitable for coupling to either an XTEN, XTEN-cross-linker, or XTEN-click-chemistry reactant of the invention using any of the conjugation methods described herein or are otherwise known to be useful in the art for conjugating such reactive groups. Specific functional moieties and their reactivities are described in Organic Chemistry, 2nd Ed. Thomas Sorrell, University Science Books, Herndon, Va. (2005). Further, it will be understood that any payload containing a reactive group or that is modified to contain a reactive group will also contain a residue after conjugation to which either the XTEN, the XTEN-cross-linker, or the XTEN-click-chemistry reactant is linked.

[0281] Exemplary payloads suitable for covalent attachment to either an XTEN polymer, XTEN-cross-linker, or XTEN-click-chemistry reactant include biologically active proteins and pharmacologically active small molecule drugs with activity. Exemplary drugs suitable for the inventive compositions can be found as set forth in the official United States Pharmacopeia, official Homeopathic Pharmacopeia of the United States, or official National Formulary, in the Physician's Desk Reference (PDR) and in the Orange Book maintained by the U.S. Food and Drug Administration (FDA). Preferred drugs are those having the needed reactive functional group or those that can be readily derivatized to provide the reactive functional group for conjugation and will retain at least a portion of the pharmacologic activity of the unconjugated payload when conjugated to XTEN.

[0282] 1. Drugs as Payloads

[0283] In one aspect of the invention, the drug payload for the targeted conjugate compositions for conjugation to the CCD described herein is one or more agents described herein or selected from one or more drugs or biologics selected from the group consisting of the compounds set forth in Tables 14-17, or a pharmaceutically acceptable salt, acid or derivative or agonist thereof. In one embodiment, the payload is one or more cytotoxic agents selected from the group consisting of the drugs set forth in Table 15. In one embodiment, the payload for incorporation into the targeted conjugate composition is one or more anti-inflammatory agents selected from the group consisting of the drugs set forth in Table 17. In another embodiment, the payload is one or more biologic agents selected from the group consisting of the biologics set forth in Table 16. In some embodiments, the drug is derivatized to introduce a reactive group for conjugation to the subject XTEN, the XTEN-cross-linkers, or the XTEN-click-chemistry reactants described herein. In another embodiment, the drug for conjugation is derivatized to introduce a cleavable linker such as, but not limited to, valine-citrulline-PAB, wherein the linker is capable of being cleaved by a circulating or an intracellular protease after administration to a subject, thereby freeing the drug payload from the conjugate.

TABLE 14
Drug Payloads for Conjugation to XTEN
Drugs

Erlotinib; Bortezomib; Alitretinoin, Allopurinol, arsenic trioxide, clofarabine, dexrazoxane,
Fulvestrant; Sutent (SU11248), Letrozole; Imatinib mesylate; PTK787/ZK 222584; Bendamustine;
Romidepsin; Pralatrexate; Cabazitaxel (XRP-6258); Everolimus (RAD-001); Abirateron; Oxaliplatin;
5-FU (5-fluorouracil), leucovorin, rapamycin; lapatinib; lonafarnib; sorafenib; gefitinib;
cyclosphosphamide; busulfan; improsulfan; piposulfan; benzodopa; carboquone; meturedopa;
uredopa; altretamine; triethylenemelamine; triethylenephosphoramide; triethylenethiophosphoramide;
trimethylomelamine; bullatacin; bullatacinone; camptothecin; topotecan; bryostatin; callystatin; CC-
1065; adozelesin; calicheamycin; auristatin; monomethyl auristatin E (MMAE); monomethyl
auristatin F (MMAF); (valine-citrulline-PAB)-monomethyl auristatin E; (valine-citrulline-PAB)-
monomethyl auristatin F; carzelesin; bizelesin; cryptophycins (particularly cryptophycin 1 and
cryptophycin 8); dolastatin; duocarmycin; eleutherobin; pancratistatin; sarcodictyin; spongistatin;
chlorambucil; chlornaphazine; cholophosphamide; estramustine; ifosfamide; mechlorethamine;
mechlorethamine oxide hydrochloride; melphalan; novembichin; phenesterine; prednimustine;
trofosfamide; uracil mustard; carmustine; chlorozotocin; fotemustine; lomustine; nimustine;
ranimnustine; calicheamicin; dynemicin; dynemicin A; clodronate; esperamicin; neocarzinostatin
chromophore; aclacinomysins, actinomycin; anthramycin; azaserine; bleomycin; cactinomycin;
carabicin; carminomycin; carzinophilin; chromomycinis; dactinomycin; daunorubicin; detorubicin; 6-
diazo-5-oxo-L-norleucine; doxorubicin; morpholino-doxorubicin; lenalidomide, cyanomorpholino-
doxorubicin; (valine-citrulline-PAB)-doxorubicin; 2-pyrrolino-doxorubicin and deoxydoxorubicin;
epirubicin; esorubicin; idarubicin; marcellomycin; mitomycin C; mycophenolic acid; nogalamycin;
olivomycin; peplomycin; potfiromycin; puromycin; quelamycin; rodorubicin; streptonigrin;
streptozocin; tubercidin; ubenimex; zinostatin; zorubicin; 5-fluorouracil (5-FU); fdenopterin;
methotrexate; pteropterin; trimetrexate; fludarabine; 6-mercaptopurine; thiamiprine; ancitabine;
azacitidine; 6-azauridine; carmofur; cytarabine; dideoxyuridine; doxifluridine; enocitabine;
meclorethamine, floxuridine; calusterone; dromostanolone propionate; epitiostanol; mepitiostane;
testolactone; aminoglutethimide; trilostane; frolinic acid; aceglatone; aldophosphamide glycoside;
aminolevulinic acid; eniluracil; amsacrine; bestrabucil; bisantrene; edatraxate; defofamine;
demecolcine; diaziquone; elformithine; elliptinium acetate; an epothilone; etoglucid; gallium nitrate;
hydroxyurea; lentinan; lonidainine; maytansine; ansamitocins; mitoguazone; mopidanmol; nitraerine;
pentostatin; phenamet; pirarubicin; losoxantrone; methoxsalen, podophyllinic acid; 2-ethylhydrazide;
procarbazine; razoxane; rhizoxin; ribavirin; zidovudine; acyclovir; gangcyclovir; vidarabine;
idoxuridine; trifluridine; foscarnet; amantadine; rimantadine; saquinavir; indinavir; ritonavir; alpha-
interferons and other interferons; AZT; sizofuran; spirogermanium; tenuazonic acid; triaziquone;
2; 2′,2″-trichlorotriethylamine; T-2 toxin; verracurin A; roridin A; anguidine); urethan; vindesine;
dacarbazine; mannomustine; mitobronitol; mitolactol; pipobroman; gacytosine; arabinoside (“Ara-
C”;); cyclophosphamide; thiotepa; taxoids; epaclitaxel; paclitaxel; docetaxel; doxetaxel; irinotecan;
pemetrexed; chloranbucil; gemcitabine; 6-thioguanine; cisplati; carboplatin; vinblastine; platinum;
etoposide, VP-16; ifosfamide; mitoxantrone; novantrone; teniposide; edatrexate; daunomycin;
aminopterin; xeloda; ibandronate; CPT-11; topoisomerase inhibitor RFS 2000;
difluoromethylornithine (DMFO); retinoic acid; capecitabine; mesna, lidocaine; bupivacaine;
memantine; quinacrine, donepezil; rivastigmine; galantamine; morphine; oxycodone;
hydromorphone; oxymorphone; metopon; apomorphine; normorphine; etorphine; buprenorphine;
meperidine; lopermide; anileridine; ethoheptazine; piminidine; betaprodine; diphenoxylate; fentanil;
sufentanil; alfentanil; remifentanil; levorphanol; dextromethorphan; phenazocine; pentazocine;
cyclazocine; methadone; isomethadone; propoxyphene; naloxone; naltrexone; treprostinil; N-
methylnaloxone; 6-amino-14-hydroxy-17-allylnordesomorphine; naltrendol;, N-methylnaltrexone;
nalbuphine; butorphanol; cyclazocine; pentazocine,; nalmephene; naltrindole; nor-binaltorphimine;
oxilorphan; 6-amino-6-desoxo-naloxone; pentazocine; levallorphanmethylnaltrexone; buprenorphine;
cyclorphan; levalorphan; cyclosporine; cyclosporine A; mycophenylate mofetil; sirolimus; tacrolimus;
prednisone; azathioprine; cyclophosphamide; prednisone; aminocaproic acid; chloroquine;
hydroxychloroquine; dexamethasone; chlorambucil; danazol; bromocriptine; Nilotinib (AMN107);
Nelarabine, amifostine, amiodarone, aminocaproic acid, aminohippurate sodium, aminoglutethimide,
aminolevulinic acid, aminosalicylic acid, amsacrine, anagrelide, anastrozole, asparaginase,
anthracyclines, bexarotene, bicalutamide, bleomycin, buserelin, busulfan, cabergoline, capecitabine,
carboplatin, carmustine, chlorambucin, cilastatin sodium, cisplatin, cladribine, clodronate,
cyclophosphamide, cyproterone, cytarabine, camptothecins, 13-cis retinoic acid, all trans retinoic
acid; dacarbazine, dactinomycin, daunorubicin, deferoxamine, dexamethasone, diclofenac,
diethylstilbestrol, docetaxel, doxorubicin, epirubicin, estramustine, etoposide, exemestane,
fexofenadine, fludarabine, fludrocortisone, fluorouracil, fluoxymesterone, flutamide, gemcitabine,
epinephrine, L-Dopa, hydroxyurea, idarubicin, ifosfamide, imatinib, irinotecan, itraconazole,
goserelin acetate, letrozole, leucovorin, levamisole, lisinopril, lovothyroxine sodium,
mechlorethamine, medroxyprogesterone, megestrol, melphalan, metaraminol bitartrate,
metoclopramide, mexiletine, mitomycin, mitotane, naloxone, nicotine, nilutamide, octreotide,
pamidronate, pilcamycin, porfimer, prednisone, prochlorperazine, ondansetron, raltitrexed, sirolimus,
tacrolimus, tamoxifen, temozolomide, testosterone, tetrahydrocannabinol, thalidomide, thioguanine,
topotecan, tretinoin, valrubicin, vincristine, vindesine, vinorelbine, dolasetron, granisetron;
formoterol, fluticasone, leuprolide, midazolam, alprazolam, amphotericin B, podophylotoxins,
nucleoside antivirals, aroyl hydrazones, sumatriptan; macrolides such as erythromycin, oleandomycin,
troleandomycin, roxithromycin, clarithromycin, davercin, azithromycin, flurithromycin,
dirithromycin, josamycin, spiromycin, midecamycin, leucomycin, miocamycin, rokitamycin,
andazithromycin, and swinolide A; fluoroquinolones such as ciprofloxacin, ofloxacin, levofloxacin,
trovafloxacin, alatrofloxacin, moxifloxicin, norfloxacin, enoxacin, grepafloxacin, sunitinib,
gatifloxacin, lomefloxacin, sparfloxacin, temafloxacin, pefloxacin, amifloxacin, fleroxacin,
tosufloxacin, prulifloxacin, irloxacin, pazufloxacin, clinafloxacin, and sitafloxacin; aminoglycosides
such as gentamicin, netilmicin, paramecin, tobramycin, amikacin, kanamycin, neomycin, and
streptomycin, vancomycin, teicoplanin, rampolanin, mideplanin, colistin, daptomycin, gramicidin,
colistimethate; polymixins such as polymixin B, capreomycin, bacitracin, penems; penicillins
including penicllinase-sensitive agents like penicillin G, penicillin V; penicllinase-resistant agents like
methicillin, oxacillin, cloxacillin, dicloxacillin, floxacillin, nafcillin; gram negative microorganism
active agents like ampicillin, amoxicillin, and hetacillin, cillin, and galampicillin; antipseudomonal
penicillins like carbenicillin, ticarcillin, azlocillin, mezlocillin, and piperacillin; cephalosporins like
cefpodoxime, cefprozil, ceftbuten, ceftizoxime, ceftriaxone, cephalothin, cephapirin, cephalexin,
cephradrine, cefoxitin, cefamandole, cefazolin, cephaloridine, cefaclor, cefadroxil, cephaloglycin,
cefuroxime, ceforanide, cefotaxime, cefatrizine, cephacetrile, cefepime, cefixime, cefonicid,
cefoperazone, cefotetan, cefinetazole, ceftazidime, loracarbef, and moxalactam, monobactams like
aztreonam; and carbapenems such as imipenem, meropenem, pentamidine isethiouate, albuterol
sulfate, lidocaine, metaproterenol sulfate, beclomethasone diprepionate, triamcinolone acetamide,
budesonide acetonide, fluticasone, ipratropium bromide, flunisolide, cromolyn sodium, and
ergotamine tartrate; taxanes such as paclitaxel; SN-38, tyrphostines, 20-epi-1,25 dihydroxy
vitaminD3, 5-ethynyluracil, abiraterone, Acivicin, Aclarubicin, Acodazole Hydrochloride, AcrQnine,
acylfulvene, adecypenol, adramycin, Aldesleukin, ALL-TK antagonists, ambamustine, amidox,
Ambomycin, Ametantrone Acetate, amrubicin, andrographolide, angiogenesis inhibitors, antagonist
D, antagonist G, antarelix, anti-androgen, anti-dorselizing morphogenetic protein-1, anti-estrogen,
antimetabolites, anti-neoplaston, anti-oestrogens, anti-sense oligonucleotides, anti-venom,
aphidicolinglycinate, apoptosis gene modulators, apoptosis regulators, apurinic acid, ara-CDP-DL-
PTBA, arginine deaminase, Asperlin, asulacrine, atamestane, atrimustine, atrsacrine, axinastatin 1,
axinastatin 2, axinastatin 3, azasetron, azatoxin, azatyrosine, Azptepa: Azotomycin, baccatin III
derivatives, balanol, Batimastat, BCR/ABLantagonists, benzochlorins, Benzodepa,
benzoylstaurosporine, staurosporine, beta-alethine, betaclamycin B, betalactamderivatives,
betamethasone, betulinic acid, bFGFinhibitor, Bicalutamide, Bisantrene Hydrochloride,
bisaziridinylspermine, bisnafide, Bisnafide Dimesylate, bistrateneA, Bleomycin Sulfate, breflate,
Brequinar Sodium, bromine epiandrosterone, Bropirimine, budotitane, buthionine sulfoximine,
calcipotriol, calphostin C, camptothecin derivatives, canarypox IL-2, capedtabine, Caracemide,
Carbetimer, carboxamide-amino-triazole: carboxyamidotriazole, CaRestM3, CARN700, cartilage
derived inhibitor, Carubicin Hydrochloride, casein kinase inhibitors(ICOS), castanospermine,
cecropin B, Cedefingol, cetrorelix, chlorins, chloroquinoxaline sulfonamide, , chlorotrianisene,
cicaprost, Cirolemycin, cis-porphyrin, clomifene analogues, clotrimazole, collismycin A, collismycin
B, combretastatin A4, combretastatin analogue, conagenin, crambescidin 816, crisnatol, Crisnatol
Mesylate, cryptophycin 8, cryptophycin A derivatives, curacin A, cyclopentanthraquinones,
cycloplatam, cypemycin, cytarabineocfosfate, cytolyticfactor, cytostatin, cytotoxic agents,
Daunorubicin Hydrochloride, Decitabine, dehydrodidemnin B, deslorelin, dexifosfamide,
Dexormaplatin, dexrmzoxane, dexverapamil, Dezaguanine, Dezaguanine Mesylate, DHEA,
diaziquorie, dicarbazine, didemnin 13, didox, diethylnorspermine, dihydro-5-
azacytidine: dihydrotaxol,9-, dioxamycin, diphenylspiromustine, docosanol, Doxorubicin
Hydrochloride, Droloxifene, Droloxifene Citrate, Dromostanolone Propionate, dronabinol,
Duazomycin, duocannycin SA, ebselen, ecorustine, edelfosine, edrocolomab, Eflomithine
Hydrochloride, eflornithine, elemene, Elsamitrucin, emitefur, Enloplatin, Enpromate, epiandrosterone,
Epipropidine, Epirubicin Hydrochloride, epristeride, Erbulozole, erythrocyte gene therapy, Esorubicin
Hydrochloride, estramustine analogue, estrogen agonists, estrogen antagonists, Etanidazole,
ethinyloestradiol, Ethiodized Oil I131, Etoposide Phosphate, Etoprine, fadrozole, Fadrozole
Hydrochloride, Fazarabine, fazarabine, fenretinide, Fenretinide: Floxuridine, finasteride, flavopiridol,
flezelastine, Fludarabine Phosphate, fluorodaunorunicin hydrochloride, Flurocitabine, forfenimex,
formestane, Fosquidone, fostriecin, Fostriecin Sodium, gadoliniumtexaphyrin, galocitabine, ganirelix,
gelatinase inhibitors: gemcitabine, Gemcitabine Hydrochloride, glutathione inhibitors, Gold Au198,
goserelin, hepsulfam, heregulin, hexamethylenebisacetamide, hexamethylmelamine, human chorionic
gonadotrophin: monophosphoryl lipid A + myobacterium cell walls k, hypericin, ibandronic acid,
Idarubicin Hydrochloride, idoxifene, idramantone, Ilmofosine, ilomastat, imidazoacridones,
imiquimod, immuno stimulant peptides: insulin-like growth factor-1 receptor inhibitor, interferon
agonists, Interferon Alfa-2a, Interferon Alfa-2b, Interferon Alfa-n1, Interferon Alfa-n3, Interferon
Beta-Ia, Interferon Gamma-Ib, iobenguane, iododoxorubicin, ipomeanol, Iproplatin, Irinotecan
Hydrochloride, iroplact, irsogladine, isobengazole, isohomohalicondrin B, itasetron, jasplakinolide,
kahalalide F, lamellarin-Ntriacetate, lanreotide, Lanreotide Acetate, leinamycin, lenograstim, lentinan
sulfate, leptolstatin, leukemia inhibiting factor, leukocyte alpha interferon, Leuprolide Acetate,
leuprolide + estrogen + progesterone, leuprorelin, liarozole, Liarozole Hydrochloride, linear polyamine
analogue, lipophilic disaccharide peptide, lipophilic platinum compounds, lissoclinamide7, lobaplatin,
lombricine, lometrexol, Lometrexol Sodium, lonidamine, Losoxantrone Hydrochloride, lovastatin,
loxoribine, luprolide, lurtotecan, lutetlumtexaphyrin, lysofylline, lyticpeptides, maitansine,
mannostatin A, marimastat, Masoprocol, maspin, matrilysin inhibitors, matrix metallo proteinase
inhibitors, mecaptopurine, Mechlorethamine Hydrochloride, Megestrol Acetate, Melengestrol
Acetate, Menogaril, merbarone, meterelin, methioninase, methlorethamine, Metoprine, Meturedepa,
microalgal, mifepristone, MIFinhibitor, miltefosine, mirimostim, mismatched double stranded RNA,
Mitindomide, Mitocarcin, Mitocromin, Mitogillin, mitoguazone, Mitomalcin, mitomycin analogues,
mitonafide, Mitosper, mitotoxin fibroblast growth factor-saporin, mofarotene, molgramostim,
monoclonal antibody, multiple drug resistance gene inhibitor, multiple tumor suppressor1-based
therapy, mustard anticancer agent, mutamycin, mycaperoxide B, mycobacterial cell wall extract,
Mycobacterium bovis, myriaporone, N-acetyldinaline: N-substitutedbenzamides, nafarelin, nagrestip,
naloxone + pentazocine, napavin, naphterpin, nartograstim, nedaplatin, nemorubicin, neridronic acid,
neutral endo peptidase, nisamycin, nitric oxide modulators, nitrogen mustard derivatives, nitroxide
antioxidant, nitrullyn, Nocodazole: Nogalamycin, O6-benzylguanine, oestradiol, okicenone,
oligonucleotides, onapristone: ondansetron, ondansetron, oracin, oral cytokine inducer, Ormaplatin,
osaterone, oxaunomycin, Oxisuran, palauamine, palmitoylrizoxin, pamidronic acid, panaxytriol,
panomifene, parabactin, pazelliptine: pegaspargase, Pegaspargase,
peldesine: pentosanpolysulfatesodium, Peliomycin, Pentamustine, pentrozole, Peplomycin Sulfate,
perflubron, Perfosfamide, perillyl alcohol, phenazinomycin, phenylacetate, phosphatase inhibitors,
picibanil, pilocarpine hydrochloride, piritrexim, Piroxantrone Hydrochloride, placetin A, placetin B,
plasminogen activator inhibitor, platinum complex, platinum compounds, platinum-triamine complex,
Plicamycin, Plomestane, Porfimer Sodium, Procarbazine Hydrochloride, propylbis-acridone,
prostaglandin J2, prostatic carcinoma, proteasome inhibitors, protein A-based immune modulator,
protein kinase C inhibitor, protein tyrosine phosphatase inhibitors, purine nucleoside phosphorylase
inhibitors, Puromycin Hydrochloride, purpurins, Pyrazofurin, pyrazoloacridine, pyridoxylated
hemoglobin polyoxyethylene conjugate, raf antagonists, ramosetron, rasfarnesyl protein transferase
inhibitors, ras inhibitors: ras-GAP inhibitor, retelliptine demethylated, rhenium Re186 etidronate,
Riboprine, ribozymes, RII retinamide, RM-131 (ghrelin agonist), RM-493 (agonis for melanocortin
type 4 receptor), Rogletimide, rohitumine, romurtide, roquinimex, rubiginone B1, ruboxyl, Safingol
Hydrochloride, Safingol, saintopin: Sar CNU, sarcophytol A, sargramostim, Sdi1 mimetics,
Semustine, senescence derived inhibitor 1, sense oligonucleotides, signal transduction inhibitors,
signal transduction modulators, Simtrazene, single chain antigen binding protein, sobuzoxane, sodium
borocaptate, sodium phenylacetate, solverol, somatomedin binding protein, sonermin, Sparfosate
Sodium, sparfosic acid, Sparsomycin, Spirogermanium Hydrochloride, Spiromustine,
spiromustine: splenopentin, Spiroplatin, splcamycin D, squalamine, stem cell inhibitor, stem-cell
division inhibitors, stipiamide, stromelysin inhibitors, Strontium Chloride Sr89, sulfmosine,
Sulofenur, superactive vasoactive intestinal peptide antagonist, suradista, suramin, swainsonine,
synthetic glycosamino glycans, Talisomycin, tallimustine, tamoxifen methiodide, tauromustine,
tazarotene, Tecogalan Sodium, Tegafur, tellurapyrylium, telnoporfin, telomerase inhibitors,
Teloxantrone Hydrochloride, Temoporfin, ternozolomide, Teroxirone, tetrachlorodecaoxide,
tetrazomine, texotere, thallblastine, thiocoraline, thrombopoietin mimetic, thymalfasin, thymopoietin
receptor agonist, thymotrinan, thyroid stimulating hormone, Tiazofurin, tinethylotiopurpurin,
Tirapazamine, titanocene dichloride, Topotecan Hydrochloride, topsentin, toremifene, Toremifene
Citrate, totipotent stem cell factor, translation inhibitors, Trestolone Acetate, triacetyluridine,
triciribine, Triciribine Phosphate: Trimetrexate, Trimetrexate Glucuronate, Triptorelin,
triptorelin: tropisetron, tubulozole hydrochloride, turosteride, tyrosine kinase inhibitors, UBC
inhibitors, urodepa, urogenital sinus-derived growth inhibitory factor, urokinase receptor antagonists,
vapreotide, variolin B, vector system, velaresol, venom, veramine, verdins, Verleporfin, verteporfin,
Vinblastine Sulfate, vincristine sulfate, vindesine, Vindesine Sulfate, Vinepidine Sulfate, Vinglycinate
Sulfate, Vinleurosine Surfate, vinorelbine tartrate, vinrosidine sulfate, vinxaltine, Vinzolidine Surfate,
vitaxin, Vorozole, zanoterone, Zeniplatin, zilascorb, zinostatin stimalamer, Zorubicin Hydrochloride,
Bovine pancreatic RNase, Human pancreatic RNAse, Mammalian pancreatic RNase, onconase,
ranpirnase, pokeweed antiviral protein, rachelmycin, ricin-A chain, gelonin, everolimus, carfilzomib,
tubulysin, tubulysin B, tubulysin M, maytansinoid DM1, maytansinoid DM4, triptolide, SJG-136,
apaziquone, irofulven, illudin S, tomaymycin, zoledronate

TABLE 15
Cytotoxic Drugs for Conjugation as Payloads to XTEN
Drugs

doxorubicin, nemorubicin, PNU-159682, paclitaxel, docetaxel,
auristatin E, auristatin F, dolastatin 10, dolastatin 15,
monomethyl auristatin E (MMAE), monomethyl auristatin F
(MMAF), monomethyl auristatin D (MMAD), maytansine,
mertansine (DM1), maytansinoid DM4, calicheamicin,
N-acetyl-calicheamicin, vinblastine, vincristine, vindesine,
vinorelbine, camptothecin, topotecan, irinotecan, SN-38,
duocarmycin A, duocarmycin B1, duocarmycin B2, duocarmycin
C1, duocarmycin C2, duocarmycin D, duocarmycin SA, duocarmycin
TM, duocarmycin MB, duocarmycin DM, mitomycin C, rachelmycin,
epothilone A, epothilone B, epothilone C, tubulysin B, tubulysin
M, pyrrolobenzodiazepine (PBD), bortezomib

TABLE 16
Biologically Active Proteins as Payloads for Linking to XTEN
Protein/Peptide Name

hTNF, IL-12, ranpirnase, human ribonuclease (RNAse), Bovine pancreatic
RNase, pokeweed antiviral protein, Pseudomonas exotoxin A, gelonin,
ricin-A, interferon-alpha, interferon-lambda, urease, amatoxin, alpha-
amanitin, beta-amanitin, gamma-amanitin, epsilon-amanitin, bouganin,
staphylococcal enterotoxin

TABLE 17
Anti-inflammatory Drugs as Payloads for Conjugation to XTEN
Drugs

dexamethasone, indomethacin, prednisolone, betamethasone dipropionate,
clobetasol propionate, fluocinonide, flurandrenolide, halobetasol
propionate, diflorasone diacetate, desoximetasone

[0284] 2. Nucleic Acids as Payloads

[0285] The invention also contemplates the use of nucleic acids as payloads in the XTEN conjugates. In one embodiment, the invention provides targeted conjugate compositions wherein the payload is selected from the group consisting of aptamers, antisense oligonucleotides, ribozyme nucleic acids, RNA interference nucleic acids, and antigene nucleic acids. Such nucleic acids used as therapeutics are know in the art (Edwin Jarald, Nucleic acid drugs: a novel approach. African Journal of Biotechnology Vol. 3 (12):662-666, 2004; Joanna B. Opalinska. Nucleic-acid therapeutics: basic principles and recent applications. Nature Reviews Drug Discovery 1:503-514, 2002).

### V). Targeting Moieties and Methods of Making Such Compositions 1. Antibody Fragments as Targeting Moieties

[0286] The present invention relates, in part, to targeted conjugate compositions comprising targeting moieties (TM) comprising antibodies or antibody fragments derived from antibodies recombinantly fused or chemically conjugated to one or more extended recombinant polypeptides (“XTEN”). In particular, the invention provides isolated targeted conjugate compositions comprising such TM that are useful in the treatment of diseases, disorders or conditions in which the targeting moiety can be directed to an antigen, ligand, or receptor implicated in, associated with, or that modulates a disease, disorder or condition, while the XTEN carrier portion can be designed to confer a desired half-life or enhanced pharmaceutical property through the payload components on the targeted conjugate compositions, as described more fully above. In one embodiment, the composition can further comprise a second targeting moiety or multiple targeting moieties that can have binding affinity for the same or a different target, resulting in multivalent or multispecific targeting moieties, respectively. The invention provides several different forms and configurations of targeting moieties and XTEN. The targeted conjugate compositions of the embodiments disclosed herein exhibit one or more or any combination of the properties and/or the embodiments as detailed herein.

[0287] In general, the targeting moieties of the subject targeted conjugate compositions exhibit a binding specificity to a given target tissue or cell when used in vivo or when utilized in an in vitro assay. The subject targeted conjugate compositions comprising two or more targeting moieties can be designed to bind the same target epitope, different epitopes on the same target, or different targets by the selective incorporation of targeting moieties with binding affinity to the respective binding sites.

[0288] The targets to which the targeting moieties of the subject targeted conjugate compositions can be directed include cytokines, cytokine-related proteins, cytokine receptors, chemokines, chemokines receptors, cell surface receptors or antigens, hormones or similar circulating proteins or peptides, oligonucleotides, or enzymatic substrates, or small organic molecules, haptens or drugs. The targets are generally associated with a disease, disorder or condition. As used herein, “a target associated with a disease, disorder or condition” means that the target is either expressed or overexpressed by disease cells or unhealthy tissues, the target causes or is a mediator or is a by-product of the disease, disorder or condition, or the target is generally found in higher concentrations in a subject with the disease, disorder or condition compared to a healthy tissue or subject, or the target is found in higher than baseline concentrations within or proximal to the areas of the disease, disorder or condition in the subject. A target may also be a distinctive epitope, ligand or chemical entity associated with a disease, disorder or condition notwithstanding any overabundance or quantity in diseased versus normal tissue (e.g., EGFR VIII variant). A non-limiting example of the foregoing is the target HER2, which is implicated in approximately 30 percent of breast cancers due to an amplification of the HER2/neu gene or over-expression of its protein product. Over-expression of the HER2 receptor in breast cancer is associated with increased disease recurrence and worse prognosis, and a humanized anti-Her2/neu antibody is used in treatment of breast cancers expressing the HER2 receptor (see for example U.S. Pat. No. 4,753,894).

[0289] In one embodiment, the one or more targeting moieties of the targeted conjugate compositions can have binding affinity to one or more tumor-associated antigens (TAA) or ligands known to be expressed on tumor or cancer cells or are otherwise associated with tumors or cancers. Tumor-associated antigens are known in the art, and are generally regarded as effective cellular targets for cancer diagnosis and therapy. In particular, researchers have sought to identify TAA that are specifically expressed on the surface of one or more particular types of cancer cell as compared to on one or more normal non-cancerous cells, and has given rise to the ability to specifically target cancer cells for destruction via antibody-based therapies. In one embodiment, the one or more targeting moieties of the targeted conjugate compositions have binding affinity to targets and ligands selected from, but not limited to the targets of Table 2, Table 3, Table 4, or Table 18.

[0290] As described more fully below, the targeting moieties can be derived from or based on sequences of antibodies, antibody fragments, receptors, immunoglobulin-like binding domains, peptides, aptimers, or can be completely synthetic. In some embodiments, the targeting moiety is non-proteinaceous; non-limiting examples of which are provided herein. The targeting moieties can comprise one or more functional antigen binding sites, the latter making the targeting moiety “multispecific.” An “antigen binding site” of a targeting moiety is one that is capable of binding a target antigen with at least a portion of the binding affinity of the parental antibody or receptor from which the antigen binding site is derived. The antigen binding site may itself be composed of more than one binding domain, linked together in the targeting moieties. “Binding domain” means a polypeptide sequence capable of attaching to an antigen or ligand but that may require additional binding domains to actually bind and/or sequester the antigen or ligand. A CDR from an antibody is an example of a binding domain. “Antibody” is used throughout the specification as a prototypical example of a targeting moiety (TM) but is not intended to be limiting.

[0291] Methods to measure binding affinity and/or other biologic activity of the targeted conjugate compositions of the invention can be those disclosed herein or methods generally known in the art. In addition, the physicochemical properties of the targeting moiety may be measured to ascertain the degree of target binding, solubility, structure and retention of stability. Assays are conducted that allow determination of binding characteristics of the targeting moieties towards a target, including binding dissociation constant (K_{d}, Kₒₙ and K_{off}), the half-life of dissociation of the ligand-receptor complex, as well as the activity of the targeting moiety to alter the biologic activity of the bound target compared to free target (IC₅₀ values). The term “K_{d}”, as used herein, is intended to refer to the dissociation constant of a particular antibody-antigen interaction as is known in the art, and would apply as a parameter of the binding affinity of a targeting moiety to its cognate ligand for the subject compositions. The term “Kₒₙ”, as used herein, is intended to refer to the on rate constant for association of an antibody to the antigen to form the antibody/antigen complex as is known in the art. The term “K_{off}”, as used herein, is intended to refer to the off rate constant for dissociation of an antibody from the antibody/antigen complex as is known in the art. The term “IC₅₀” refers to the concentration needed to inhibit half of the maximum biological response of the ligand agonist, and is generally determined by competition binding assays.

[0292] Techniques such as flow cytometry or surface plasmon resonance can be used to detect binding events. The assays may comprise soluble antigens or receptor molecules, or may determine the binding to cell-expressed receptors. Such assays may include cell-based assays, including assays for proliferation, cell death, apoptosis and cell migration. The binding affinity of the subject compositions for the target ligands can be assayed using binding or competitive binding assays, such as Biacore™ assays with chip-bound receptors or targeting moieties or ELISA assays, as described in U.S. Pat. No. 5,534,617, assays described in the Examples herein, radio-receptor assays, or other assays known in the art. The binding affinity constant can then be determined using standard methods, such as Scatchard analysis, as described by van Zoelen, et al., Trends Pharmacol Sciences (1998) 19)12):487, or other methods known in the art. In addition, libraries of sequence variants of targeting moieties can be compared to the corresponding native or parental antibodies using a competitive ELISA binding assay to determine whether they have the same binding specificity and affinity as the parental antibody, or some fraction thereof such that they are suitable for inclusion in the targeting moieties. The results of such assays can be used in an iterative process of sequence modification of the targeting moieties followed by binding and physicochemical characterization assays to guide the process by which specific constructs with the desired properties are selected.

[0293] The invention provides isolated targeting moieties in which the binding affinity of the one or more targeting moieties for target ligands can be at least about 1%, or at least about 10%, or at least about 20%, or at least about 30%, or at least about 40%, or at least about 50%, or at least about 60%, or at least about 70%, or at least about 80%, or at least about 90%, or at least about 95%, or at least about 99%, or at least about 99.9% or more of the affinity of a parental antibody or binding moiety not bound to XTEN for the target receptor or ligand. In one embodiment, the K_{d} between the one or more targeting moieties of the subject targeted conjugate composition and a target ligand or ligands is less than about 10⁻⁴ M, alternatively less than about 10⁻⁵ M, alternatively less than about 10⁻⁶ M, alternatively less than about 10⁻⁷ M, alternatively less than about 10⁻⁸ M, alternatively less than about 10⁻⁹ M, or less than about 10⁻¹⁰ M, or less than about 10⁻¹¹ M, or less than about 10⁻¹² M. In the foregoing embodiment, the binding affinity of the targeting moiety towards the target would be characterized as “specific.” The invention contemplates targeted conjugate compositions comprising two or more targeting moieties in which the binding affinities for the respective targeting moieties may independently be between the ranges of values of the foregoing. It will be understood by one of skill in the art that the TM component of the targeted conjugate compositions is intended to selectively or disproportionately deliver the composition and/or the payload(s) of the composition to the target tissue or cell, compared to healthy tissue or healthy cells in a subject in which the composition is administered or, in the case of in vitro assays, to the proximity of the target cells. In some of the foregoing embodiments f the paragraph, the one or more targeting moieties of the subject targeted conjugate compositions specifically bind to a target of Table 2, Table 3, Table 4, Table 18, or Table 19.

TABLE 18
Tumor cell lines

| | | | Receptor |
|---|---|---|---|
| Target | Cell line | Tissue | status |
| LHRHR | MCF-7 | Breast | positive |
| | MDA-MB-231 | Breast (HER2−/ER−/PR−) | positive |
| | HCC1806 | Breast (HER2−/ER−/PR−) | positive |
| | HCC1937 | Breast (HER2−/ER−/PR−) | positive |
| | OV-1063 | Ovarian | positive |
| | EFO-21 | Ovarian | positive |
| | EFO-27 | Ovarian | positive |
| | NIH:OVCAR-3 | Ovarian | positive |
| | BG-1 | Ovarian | positive |
| | HEC-1A | Endometrial | positive |
| | HEC-1B | Endometrial | positive |
| | Ishikawa | Endometrial | positive |
| | KLE | Endometrial | positive |
| | AN-3-CA | Endometrial | positive |
| | MiaPaCa | Pancreatic | positive |
| | Panc-1 | Pancreatic | positive |
| | rat Dunning | Prostate (androgen-dep) | positive |
| | R-3327-H | | |
| | PC-82 | Prostate (androgen-dep) | positive |
| | MDA-PCa-2b | Prostate (androgen-indep) | positive |
| | C4-2 (derivative | Prostate (androgen-dep) | positive |
| | of LNCaP) | | |
| | A549 | Lung | positive |
| | A2780 | Ovarian | positive |
| | UCI-107* | Ovarian | negative |
| | SK-OV-3* | Ovarian | negative |
| | SW 626 | Ovarian | negative |
| | MFE-296* | Endometrial | negative |
| Folate | KB | Nasopharyngeal | positive |
| receptor | IGROV | Ovarian | positive |
| | SK-OV-3 | Ovarian | positive |
| | HeLa | Cervical | positive |
| | LoVo | Colorectal | positive |
| | SW620 | Colorectal | positive |
| | MDA-MB-231 | Breast | positive |
| | Madison 109 | Lung | positive |
| | A549 | Lung | negative |
| | A375 | Multiple melanoma | negative |
| | LS-174T | Colorectal | negative |
| | SK-BR-3 | Breast | negative |
| | HT-29 | Colorectal | negative |
| | 4T1 | Breast | negative |
| | SK-BR-3 | Breast | negative |
| | PC-3 | Prostate | negative |
| Integrin | HUVEC | Endothelial | positive |
| | A2780 | Ovarian | positive |
| | OVCAR3 | Ovarian | positive |
| | H2009 | Lung | positive |
| | PC-3 | Prostate | positive |
| | DU145 | Prostate | positive |
| | MDA-MB-435 | Melanoma | positive |
| | HT29 | Colorectal | positive |
| | A549 | Lung | positive |
| | A498 | Kidney | positive |
| | Colo205 | Colorectal | positive |
| | U87MG | Glioblastoma | positive |
| | H1299 | Lung | negative |
| CD13 | A549 | Lung | positive |
| | MDA-MB-231 | Breast | negative |
| SSTR2 | HCC-1806 | Breast | positive |
| | A549 | Lung | positive |
| | HepG2 | Liver | positive |
| HER2 | SK-OV-3 | Ovarian | positive |
| | SK-Br-3 | Breast | positive |
| | MCF-7 | Breast | non-amplified |
| | BT-474 | Breast | positive |
| | HCC-1954 | Breast | positive |
| | A549 | Lung | positive |
| MUC-1 | HeLa | Cervical | positive |
| | OVCAR-3 | Ovarian | positive |
| | SK-OV-3 | Ovarian | positive |
| | LS-174T | Colorectal | negative |
| | MCF-7 | Breast | positive |
| | A549 | Lung | positive |
| PSMA | LNCaP | Prostate | positive |
| | MDA-PCa-2b | Prostate | positive |
| | CWR22Rv1 | Prostate | positive |
| | PC-3 | Prostate | negative |
| | DU145 | Prostate | negative |
| EpCAM | Colo205 | Colorectal | positive |
| | HCT-15 | Colorectal | positive |
| | WiDr | Colorectal | positive |
| | BxPc-3 | Pancreas | positive |
| | Capan-1 | Pancreas | positive |
| | OZ | Bile duct | positive |
| | MCF-7 | Breast | positive |
| | A549 | Lung | positive |
| | HepG2 | Liver | positive |
| | Hep3B | Liver | positive |
| | SK-Hep1 | Liver | negative |
| | Colo320DM | Colorectal | negative |
| EGFR | A549 | Lung | positive |
| | H292 | Lung | positive |
| | H1838 | Lung | positive |
| | SKMES | Lung | positive |
| | A431 | Epidermoid | positive |
| TAG-72 | LS174T | Colorectal | positive |
| | CWR22 | Prostate | positive |
| | HT29 | Colorectal | negative |

[0294] In one embodiment, the invention provides targeted conjugate compositions comprising targeting moieties capable of binding to a single target. In another embodiment, the targeting moieties of the invention are multispecific and the targeting moieties specifically bind at least two different target antigens or ligands (“bifunctional” or “multispecific”), or different epitopes on the same target. The multivalent targeting moieties can be designed to be bifunctional in that they can incorporate heterologous binding domains from different “parental” antibodies and bind two different ligands or antigens in order to better effect a desired pharmacological response; e.g., dimerization of receptors on a target cell surface leading to cell signaling or, alternatively, cell death, or modulating a biological function of one or more targets. Multispecific targeting moieties leading to cell death, whether by triggering apoptosis or necrosis or by the effects of the delivered cytotoxic payload, are expected to have utility in, particularly, the treatment of oncological disease. Non-limiting examples of pairs of targets contemplated as suitable for multivalent, bifunctional targeting moieties include: IGF1 and IGF2; IGF1/2 and Erb2B; VEGFR and EGFR, CD20 and CD3, CD138 and CD20, CD38 and CD20, CD38 & CD138, CD40 and CD20, CD138 and CD40, CD38 and CD40, IL-1α and IL-1β, IL-12 and IL-18, TNFα and IL-23, TNFα and IL-13, TNF and IL-18, TNF and IL-12, TNF and IL-1beta, TNF and MIF, TNF and IL-17, and TNF and IL-15, TNF and VEGF, VEGFR and EGFR, IL-13 and IL-9, IL-13 and IL-4, IL-13 and IL-5, IL-13 and IL-25, IL-13 and TARC, IL-13 and MDC, IL-13 and MIF, IL-13 and TGF-β, IL-13 and LHR agonist, IL-13 and CL25, IL-13 and SPRR2a, IL-13 and SPRR2b, IL-13 and ADAM8, and TNFα and PGE4, IL-13 and PED2, TNF and PEG2, CD19 and CD20, CD-8 and IL-6, PDL-1 and CTLA-4, CTLA-4 and BTNO2, CSPGs and RGM A, IL-12 and IL-18, IL-12 and TWEAK, IL-13 and ADAM8, IL-13 and CL25, IL-13 and IL-1beta, IL-13 and IL-25, IL-13 and IL-4, IL-13 and IL-5, IL-13 and IL-9, IL-13 and LHR agonist, IL-13 and MDC, IL-13 and MIF, IL-13 and PED2, IL-13 and SPRR2a, IL-13 and SPRR2b, IL-13 and TARC, IL-13 and TGF-β, IL-1α and IL-1β, MAG and RGM A, NgR and RGM A, NogoA and RGM A, OMGp and RGM A, RGM A and RGM B, Te38 and TNFα, TNFα and IL-12, TNFα and IL-12p40, TNFα and IL-13, TNFα and IL-15, TNFα and IL-17, TNFα and IL-18, TNFα and IL-1beta, TNFα and IL-23, TNFα and MIF, TNFα and PEG2, TNFα and PGE4, TNFα and VEGF, TNFα and RANK ligand, TNFα and Blys, TNFα and GP130, TNFα and CD-22; and TNFα and CTLA-4,

[0295] The targeting moieties of the targeted conjugate composition can be derived from one or more fragments of various monoclonal antibodies known in the art. Non-limiting examples of such monoclonal antibodies include, but are not limited to anti-TNF antibody (U.S. Pat. No. 6,258,562), anti-IL-12 and or anti-IL-12p40 antibody (U.S. Pat. No. 6,914,128); anti-IL-18 antibody (US 2005/0147610 A1), anti-RANKL (U.S. Pat. No. 7,411,050), anti-C5, anti-CBL, anti-CD147, anti-gp120, anti-VLA4, anti-CD11a, anti-CD18, anti-VEGF, anti-CD40L, anti-Id, anti-ICAM-1, anti-CXCL13, anti-CD2, anti-EGFR, anti-TGF-beta 2, anti-E-selectin, anti-Fact VII, anti-Her2/neu, anti-Fgp, anti-CD11/18, anti-CD14, anti-ICAM-3, anti-CD80, anti-CD4, anti-CD3, anti-CD23, anti-beta2-integrin, anti-alpha4beta7, anti-CD52, anti-HLA DR, anti-CD22, anti-CD20, anti-MIF, anti-CD64 (FcR), anti-TCR alpha beta, anti-CD2, anti-Hep B, anti-CA 125, anti-EpCAM, anti-gp120, anti-CMV, anti-gpIIbIIIa, anti-IgE, anti-CD25, anti-CD33, anti-HLA, anti-VNRintegrin, anti-IL-1alpha, anti-IL-1beta, anti-IL-1 receptor, anti-IL-2 receptor, anti-IL-4, anti-IL4 receptor, anti-ILS, anti-IL-5 receptor, anti-IL-6, anti-IL-8, anti-IL-9, anti-IL-13, anti-IL-13 receptor, anti-IL-17, and anti-IL-23 (see Presta L G. 2005 Selection, design, and engineering of therapeutic antibodies J Allergy Clin Immunol. 116:731-6 and Clark, M., “Antibodies for Therapeutic Applications,” Department of Pathology, Cambridge University, UK, 15 Oct. 2000, published online at M. Clark's home page at the website for the Department of Pathology, Cambridge University).

[0296] In some embodiments, the targeting moieties are derived from one or more fragments of therapeutic monoclonal antibodies approved for use in humans or antibodies that have demonstrated efficacy in clinical trials or established preclinical models of diseases, disorders or conditions. Non-limiting examples of such monoclonal antibodies are presented in Table 19. Such therapeutic antibodies include, but are not limited to, rituximab, IDEC/Genentech/Roche (see for example U.S. Pat. No. 5,736,137), a chimeric anti-CD20 antibody used in the treatment of many lymphomas, leukemias, and some autoimmune disorders; ofatumumab, an anti-CD20 antibody approved for use for chronic lymphocytic leukemia, and under development for follicular non-Hodgkin's lymphoma, diffuse large B cell lymphoma, rheumatoid arthritis and relapsing remitting multiple sclerosis, being developed by GlaxoSmithKline; lucatumumab (HCD122), an anti-CD40 antibody developed by Novartis for Non-Hodgkin's or Hodgkin's Lymphoma (see, for example, U.S. Pat. No. 6,899,879), AME-133, an antibody developed by Applied Molecular Evolution which binds to cells expressing CD20 to treat non-Hodgkin's lymphoma, veltuzumab (hA20), an antibody developed by Immunomedics, Inc. which binds to cells expressing CD20 to treat immune thrombocytopenic purpura, HumaLYM developed by Intracel for the treatment of low-grade B-cell lymphoma, and ocrelizumab, developed by Genentech which is an anti-CD20 monoclonal antibody for treatment of rheumatoid arthritis (see for example U.S. Patent Application 20090155257), trastuzumab (see for example U.S. Pat. No. 5,677,171), a humanized anti-Her2/neu antibody approved to treat breast cancer developed by Genentech; pertuzumab, an anti-Her2 dimerization inhibitor antibody developed by Genentech in treatment of in prostate, breast, and ovarian cancers; (see for example U.S. Pat. No. 4,753,894); cetuximab, an anti-EGRF antibody used to treat epidermal growth factor receptor (EGFR)-expressing, KRAS wild-type metastatic colorectal cancer and head and neck cancer, developed by Imclone and BMS (see U.S. Pat. No. 4,943,533; PCT WO 96/40210); panitumumab, a fully human monoclonal antibody specific to the epidermal growth factor receptor (also known as EGF receptor, EGFR, ErbB-1 and Herl, currently marketed by Amgen for treatment of metastatic colorectal cancer (see U.S. Pat. No. 6,235,883); zalutumumab, a fully human IgG1 monoclonal antibody developed by Genmab that is directed towards the epidermal growth factor receptor (EGFR) for the treatment of squamous cell carcinoma of the head and neck (see for example U.S. Pat. No. 7,247,301); nimotuzumab, a chimeric antibody to EGFR developed by Biocon, YM Biosciences, Cuba, and Oncosciences, Europe) in the treatment of squamous cell carcinomas of the head and neck, nasopharyngeal cancer and glioma (see for example U.S. Pat. No. 5,891,996; U.S. Pat. No. 6,506,883); alemtuzumab, a humanized monoclonal antibody to CD52 marketed by Bayer Schering Pharma for the treatment of chronic lymphocytic leukemia (CLL), cutaneous T-cell lymphoma (CTCL) and T-cell lymphoma; muromonab-CD3, an anti-CD3 antibody developed by Ortho Biotech/Johnson & Johnson used as an immunosuppressant biologic given to reduce acute rejection in patients with organ transplants; ibritumomab tiuxetan, an anti-CD20 monoclonal antibody developed by IDEC/Schering AG as treatment for some forms of B cell non-Hodgkin's lymphoma; gemtuzumab ozogamicin, an anti-CD33 (p67 protein) antibody linked to a cytotoxic chelator tiuxetan, to which a radioactive isotope is attached, developed by Celltech/Wyeth used to treat acute myelogenous leukemia; alefacept, an anti-LFA-3 Fc fusion developed by Biogen that is used to control inflammation in moderate to severe psoriasis with plaque formation; abciximab, made from the Fab fragments of an antibody to the IIb/IIIa receptor on the platelet membrane developed by Centocor/Lilly as a platelet aggregation inhibitor mainly used during and after coronary artery procedures; basiliximab, a chimeric mouse-human monoclonal antibody to the a chain (CD25) of the IL-2 receptor of T cells, developed by Novartis, used to prevent rejection in organ transplantation; palivizumab, developed by Medimmune; infliximab (REMICADE), an anti-TNFalpha antibody developed by Centocor/Johnson and Johnson, adalimumab (HUMIRA), an anti-TNFalpha antibody developed by Abbott, HUMICADE, an anti-TNFalpha antibody developed by Celltech, etanercept (ENBREL), an anti-TNFalpha Fc fusion developed by Immunex/Amgen, ABX-CBL, an anti-CD147 antibody developed by Abgenix, ABX-IL8, an anti-IL8 antibody developed by Abgenix, ABX-MA1, an anti-MUC18 antibody developed by Abgenix, Pemtumomab (R1549, 90Y-muHMFG1), an anti-MUC1 in development by Antisoma, Therex (R1550), an anti-MUC1 antibody developed by Antisoma, AngioMab (AS1405), developed by Antisoma, HuBC-1, developed by Antisoma, Thioplatin (AS1407) developed by Antisoma, ANTEGREN (natalizumab) a humanized monoclonal antibody against the cell adhesion molecule a4-integrin, an anti-alpha-4-beta-1 (VLA4) and alpha-4-beta-7 antibody developed by Biogen, VLA-1 mAb, an anti-VLA-1 integrin antibody developed by Biogen, LTBR mAb, an anti-lymphotoxin beta receptor (LTBR) antibody developed by Biogen, CAT-152, an anti-TGF-β2 antibody developed by Cambridge Antibody Technology, J695, an anti-IL-12 antibody developed by Cambridge Antibody Technology and Abbott, CAT-192, an anti-TGFβ1 antibody developed by Cambridge Antibody Technology and Genzyme, CAT-213, an anti-Eotaxin1 antibody developed by Cambridge Antibody Technology, LYMPHOSTAT-B, an anti-Blys antibody developed by Cambridge Antibody Technology and Human Genome Sciences Inc., TRAIL-R1mAb, an anti-TRAIL-R1 antibody developed by Cambridge Antibody Technology and Human Genome Sciences, Inc., bevacizumab (AVASTIN, rhuMAb-VEGF), an anti-VEGF antibody developed by Genentech, HERCEPTIN, an anti-HER receptor family antibody developed by Genentech, Anti-Tissue Factor (ATF), an anti-Tissue Factor antibody developed by Genentech, XOLAIR (Omalizumab), an anti-IgE antibody developed by Genentech, MLN-02 Antibody (formerly LDP-02), developed by Genentech and Millennium Pharmaceuticals, HUMAX CD4®, an anti-CD4 antibody developed by Genmab, tocilizuma, and anti-IL6R antibody developed by Chugai, HUMAX-IL15, an anti-IL15 antibody developed by Genmab and Amgen, HUMAX-Inflam, developed by Genmab and Medarex, HUMAX-Cancer, an anti-Heparanase I antibody developed by Genmab and Medarex and Oxford GlycoSciences, HUMAX-Lymphoma, developed by Genmab and Amgen, HUMAX-TAC, developed by Genmab, IDEC-131, and anti-CD40L antibody developed by IDEC Pharmaceuticals, IDEC-151 (Clenoliximab), an anti-CD4 antibody developed by IDEC Pharmaceuticals, IDEC-114, an anti-CD80 antibody developed by IDEC Pharmaceuticals, IDEC-152, an anti-CD23 developed by IDEC Pharmaceuticals, anti-macrophage migration factor (MIF) antibodies developed by IDEC Pharmaceuticals, BEC2, an anti-idiotypic antibody developed by Imclone, IMC-1C11, an anti-KDR antibody developed by Imclone, DC101, an anti-flk-1 antibody developed by Imclone, anti-VE cadherin antibodies developed by Imclone, CEA-CIDE (labetuzumab), an anti-carcinoembryonic antigen (CEA) antibody developed by Immunomedics, Yervoy (ipilimumab), an anti-CTLA4 antibody developed by Bristol-Myers Sequibb in the treatment of melanoma, Lymphocide® (Epratuzumab) an anti-CD22 antibody developed by Immunomedics, AFP-Cide, developed by Immunomedics, MyelomaCide, developed by Immunomedics, LkoCide, developed by Immunomedics, ProstaCide, developed by Immunomedics, MDX-010, an anti-CTLA4 antibody developed by Medarex, MDX-060, an anti-CD30 antibody developed by Medarex, MDX-070 developed by Medarex, MDX-018 developed by Medarex, OSIDEM (IDM-1), and anti-Her2 antibody developed by Medarex and Immuno-Designed Molecules, HUMAX®-CD4, an anti-CD4 antibody developed by Medarex and Genmab, HuMax-IL15, an anti-IL15 antibody developed by Medarex and Genmab, CNTO 148, an anti-TNFa antibody developed by Medarex and Centocor/J&J, CNTO 1275, an anti-cytokine antibody developed by Centocor/J&J, MOR101 and MOR102, anti-intercellular adhesion molecule-1 (ICAM-1) (CD54) antibodies developed by MorphoSys, MOR201, an anti-fibroblast growth factor receptor 3 (FGFR-3) antibody developed by MorphoSys, tremelimumab, an anti-CTLA-4 antibody developed by Pfizer, visilizumab, an anti-CD3 antibody developed by Protein Design Labs, HUZAF, an anti-gamma interferon antibody developed by Protein Design Labs, Anti-a 5β1 Integrin, developed by Protein Design Labs, anti-IL-12, developed by Protein Design Labs, ING-1, an anti-Ep-CAM antibody developed by Xoma, XOLAIR® (Omalizumab) a humanized anti-IgE antibody developed by Genentech and Novartis, and MLN01, an anti-Beta2 integrin antibody developed by Xoma; all of the above-cited antibody references in this paragraph are expressly incorporated herein by reference. The sequences for the above antibodies can be obtained from publicly available databases, patents, or literature references. In addition, non-limiting examples of VH and VL sequences from such monoclonal antibody sequences are presented in Table 19. Examplary linkers suitable for recombinantly linking the VL and VH sequences as scFv or other such antibody fragment compositions are presented in Table 19, but the invention also contemplates use of linkers known in the art for the generation of scFv.

TABLE 19
Monoclonal Antibodies and Sequences

| Trade | Antibody | | | SEQ ID | | SEQ ID |
|---|---|---|---|---|---|---|
| Name | Name | Target | VH Sequence | NO: | VL Sequence | NO: |
| Tysabri ™ | natalizumab | Alpha 4 | QVQLVQSGAEVKK | 432 | DIQMTQSPSSLSAS | 511 |
| | | Integrin | PGASVKVSCKASG | | VGDRVTITCKTSQD | |
| | | | FNIKDTYIHWVRQ | | INKYMAWYQQTPGK | |
| | | | APGQRLEWMGRID | | APRLLIHYTSALQP | |
| | | | PANGYTKYDPKFQ | | GIPSRFSGSGSGRD | |
| | | | GRVTITADTSAST | | YTFTISSLQPEDIA | |
| | | | AYMELSSLRSEDT | | TYYCLQYDNLWTFG | |
| | | | AVYYCAREGYYGN | | QGTKVEIK | |
| | | | YGVYAMDYWGQGT | | | |
| | | | LVTVSS | | | |
| REGN910 | nesvacumab | Ang2 | EVQLVESGGGLVQ | 433 | EIVLTQSPGTLSLS | 512 |
| | | | PGGSLRLSCAASG | | PGERATLSCRASQS | |
| | | | FTESSYDIHWVRQ | | VSSTYLAWYQQKPG | |
| | | | ATGKGLEWVSAIG | | QAPRLLIYGASSRA | |
| | | | PAGDTYYPGSVKG | | TGIPDRFSGSGSGT | |
| | | | RFTISRENAKNSL | | DFTLTISRLEPEDF | |
| | | | YLQMNSLRAGDTA | | AVYYCQHYDNSQTF | |
| | | | VYYCARGLITFGG | | GQGTKVEIK | |
| | | | LIAPFDYWGQGTL | | | |
| | | | VTVSS | | | |
| hMFE23 | | CEA | QVKLEQSGAEVVK | 434 | ENVLTQSPSSMSAS | 513 |
| | | | PGASVKLSCKASG | | VGDRVNIACSASSS | |
| | | | FNIKDSYMHWLRQ | | VSYMHWFQQKPGKS | |
| | | | GPGQRLEWIGWID | | PKLWIYSTSNLASG | |
| | | | PENGDTEYAPKFQ | | VPSRFSGSGSGTDY | |
| | | | GKATFTTDTSANT | | SLTISSMQPEDAAT | |
| | | | AYLGLSSLRPEDT | | YYCQQRSSYPLTFG | |
| | | | AVYYCNEGTPTGP | | GGTKLEIK | |
| | | | YYFDYWGQGTLVT | | | |
| | | | VSS | | | |
| M5A | | CEA | EVQLVESGGGLVQ | 435 | DIQLTQSPSSLSAS | 514 |
| (humanized | | | PGGSLRLSCAASG | | VGDRVTITCRAGES | |
| T84.66) | | | FNIKDTYMHWVRQ | | VDIFGVGFLHWYQQ | |
| | | | APGKGLEWVARID | | KPGKAPKLLIYRAS | |
| | | | PANGNSKYADSVK | | NLESGVPSRFSGSG | |
| | | | GRFTISADTSKNT | | SRTDFTLTISSLQP | |
| | | | AYLQMNSLRAEDT | | EDFATYYCQQTNED | |
| | | | AVYYCAPFGYYVS | | PYTFGQGTKVEIK | |
| | | | DYAMAYWGQGTLV | | | |
| | | | TVSS | | | |
| M5B | | CEA | EVQLVESGGGLVQ | 436 | DIQLTQSPSSLSAS | 515 |
| (humanized | | | PGGSLRLSCAASG | | VGDRVTITCRAGES | |
| T84.66) | | | FNIKDTYMHWVRQ | | VDIFGVGFLHWYQQ | |
| | | | APGKGLEWVARID | | KPGKAPKLLIYRAS | |
| | | | PANGNSKYVPKFQ | | NLESGVPSRFSGSG | |
| | | | GRATISADTSKNT | | SRTDFTLTISSLQP | |
| | | | AYLQMNSLRAEDT | | EDFATYYCQQTNED | |
| | | | AVYYCAPFGYYVS | | PYTFGQGTKVEIK | |
| | | | DYAMAYWGQGTLV | | | |
| | | | TVSS | | | |
| CEA-Cide | Labetuzumab | CEACAM5 | EVQLVESGGGVVQ | 437 | DIQLTQSPSSLSAS | 516 |
| | (MN-14) | | PGRSLRLSCSASG | | VGDRVTITCKASQD | |
| | | | FDFTTYWMSWVRQ | | VGTSVAWYQQKPGK | |
| | | | APGKGLEWIGEIH | | APKLLIYWTSTRHT | |
| | | | PDSSTINYAPSLK | | GVPSRFSGSGSGTD | |
| | | | DRFTISRDNAKNT | | FTFTISSLQPEDIA | |
| | | | LFLQMDSLRPEDT | | TYYCQQYSLYRSFG | |
| | | | GVYFCASLYFGFP | | QGTKVEIK | |
| | | | WFAYWGQGTPVTV | | | |
| | | | SS | | | |
| CEA-Scan | arcitumomab | CEACAM5 | EVKLVESGGGLVQ | 438 | QTVLSQSPAILSAS | 517 |
| | | | PGGSLRLSCATSG | | PGEKVTMTCRASSS | |
| | | | FTFTDYYMNWVRQ | | VTYIHWYQQKPGSS | |
| | | | PPGKALEWLGFIG | | PKSWIYATSNLASG | |
| | | | NKANGYTTEYSAS | | VPARFSGSGSGTSY | |
| | | | VKGRFTISRDKSQ | | SLTISRVEAEDAAT | |
| | | | SILYLQMNTLRAE | | YYCQHWSSKPPTFG | |
| | | | DSATYYCTRDRGL | | GGTKLEIKR | |
| | | | RFYFDYWGQGTTL | | | |
| | | | TVSS | | | |
| MT111 | | CEACAM5 | EVQLVESGGGLVQ | 439 | QAVLTQPASLSASP | 518 |
| | | | PGRSLRLSCAASG | | GASASLTCTLRRGI | |
| | | | FTVSSYWMHWVRQ | | NVGAYSIYWYQQKP | |
| | | | APGKGLEWVGFIR | | GSPPQYLLRYKSDS | |
| | | | NKANGGTTEYAAS | | DKQQGSGVSSRFSA | |
| | | | VKGRFTISRDDSK | | SKDASANAGILLIS | |
| | | | NTLYLQMNSLRAE | | GLQSEDEADYYCMI | |
| | | | DTAVYYCARDRGL | | WHSGASAVFGGGTK | |
| | | | RFYFDYWGQGTTV | | LTVL | |
| | | | TVSS | | | |
| MT103 | blinatumomab | CD19 | QVQLQQSGAELVR | 440 | DIQLTQSPASLAVS | 519 |
| | | | PGSSVKISCKASG | | LGQRATISCKASQS | |
| | | | YAFSSYWMNWVKQ | | VDYDGDSYLNWYQQ | |
| | | | RPGQGLEWIGQIW | | IPGQPPKLLIYDAS | |
| | | | PGDGDTNYNGKFK | | NLVSGIPPRFSGSG | |
| | | | GKATLTADESSST | | SGTDFTLNIHPVEK | |
| | | | AYMQLSSLASEDS | | VDAATYHCQQSTED | |
| | | | AVYFCARRETTTV | | PWTFGGGTKLEIK | |
| | | | GRYYYAMDYWGQG | | | |
| | | | TTVTVSS | | | |
| Arzerra | ofatumumab | CD20 | EVQLVESGGGLVQ | 441 | EIVLTQSPATLSLS | 520 |
| | | | PGRSLRLSCAASG | | PGERATLSCRASQS | |
| | | | FTFNDYAMHWVRQ | | VSSYLAWYQQKPGQ | |
| | | | APGKGLEWVSTIS | | APRLLIYDASNRAT | |
| | | | WNSGSIGYADSVK | | GIPARFSGSGSGTD | |
| | | | GRFTISRDNAKKS | | FTLTISSLEPEDFA | |
| | | | LYLQMNSLRAEDT | | VYYCQQRSNWPITF | |
| | | | ALYYCAKDIQYGN | | GQGTRLEIKR | |
| | | | YYYGMDVWGQGTT | | | |
| | | | VTVSSA | | | |
| Bexxar ™ | toSitumomab | CD20 | QAYLQQSGAELVR | 442 | QIVLSQSPAILSAS | 521 |
| | | | PGASVKMSCKASG | | PGEKVTMTCRASSS | |
| | | | YTFTSYNMHWVKQ | | VSYMHWYQQKPGSS | |
| | | | TPRQGLEWIGAIY | | PKPWIYAPSNLASG | |
| | | | PGNGDTSYNQKFK | | VPARFSGSGSGTSY | |
| | | | GKATLTVDKSSST | | SLTISRVEAEDAAT | |
| | | | AYMQLSSLTSEDS | | YYCQQWSFNPPTFG | |
| | | | AVYFCARVVYYSN | | AGTKLELK | |
| | | | SYWYFDVWGTGTT | | | |
| | | | VTVSG | | | |
| GAZYVA | Obinutuzumab | CD20 | QVQLVQSGAEVKK | 443 | DIVMTQTPLSLPVT | 522 |
| | | | PGSSVKVSCKASG | | PGEPASISCRSSKS | |
| | | | YAFSYSWINWVRQ | | LLHSNGITYLYWYL | |
| | | | APGQGLEWMGRIF | | QKPGQSPQLLIYQM | |
| | | | PGDGDTDYNGKFK | | SNLVSGVPDRFSGS | |
| | | | GRVTITADKSTST | | GSGTDFTLKISRVE | |
| | | | AYMELSSLRSEDT | | AEDVGVYYCAQNLE | |
| | | | AVYYCARNVFDGY | | LPYTEGGGTKVEIK | |
| | | | WLVYWGQGTLVTV | | | |
| | | | SS | | | |
| | Ocrelizumab/ | CD20 | EVQLVESGGGLVQ | 444 | DIQMTQSPSSLSAS | 523 |
| | 2H7 v16 | | PGGSLRLSCAASG | | VGDRVTITCRASSS | |
| | | | YTFTSYNMHWVRQ | | VSYMHWYQQKPGKA | |
| | | | APGKGLEWVGAIY | | PKPLIYAPSNLASG | |
| | | | PGNGDTSYNQKFK | | VPSRFSGSGSGTDF | |
| | | | GRFTISVDKSKNT | | TLTISSLQPEDFAT | |
| | | | LYLQMNSLRAEDT | | YYCQQWSFNPPTFG | |
| | | | AVYYCARVVYYSN | | QGTKVEIKR | |
| | | | SYWYFDVWGQGTL | | | |
| | | | VTVSS | | | |
| Rituxan ™ | rituximab | CD20 | QVQLQQPGAELVK | 445 | QIVLSQSPAILSAS | 524 |
| | | | PGASVKMSCKASG | | PGEKVTMTCRASSS | |
| | | | YTFTSYNMHWVKQ | | VSYTHWFQQKPGSS | |
| | | | TPGRGLEWIGAIY | | PKPWIYATSNLASG | |
| | | | PGNGDTSYNQKFK | | VPVRFSGSGSGTSY | |
| | | | GKATLTADKSSST | | SLTISRVEAEDAAT | |
| | | | AYMQLSSLTSEDS | | YYCQQWTSNPPTFG | |
| | | | AVYYCARSTYYGG | | GGTKLEIKR | |
| | | | DWYFNVWGAGTTV | | | |
| | | | TVSAA | | | |
| Zevalin ™ | ibritumomab | CD20 | QAYLQQSGAELVR | 446 | QIVLSQSPAILSAS | 525 |
| | tieuxetan | | PGASVKMSCKASG | | PGEKVTMTCRASSS | |
| | | | YTFTSYNMHWVKQ | | VSYMHWYQQKPGSS | |
| | | | TPRQGLEWIGAIY | | PKPWIYAPSNLASG | |
| | | | PGNGDTSYNQKFK | | VPARFSGSGSGTSY | |
| | | | GKATLTVDKSSST | | SLTISRVEAEDAAT | |
| | | | AYMQLSSLTSEDS | | YYCQQWSFNPPTFG | |
| | | | AVYFCARVVYYSN | | AGTKLELK | |
| | | | SYWYFDVWGTGTT | | | |
| | | | VTVSA | | | |
| Mylotarg | gemtuzumab | CD33 | QLVQSGAEVKKPG | 447 | DIQLTQSPSTLSAS | 526 |
| | | | SSVKVSCKASGYT | | VGDRVTITCRASES | |
| | | | ITDSNIHWVRQAP | | LDNYGIRFLTWFQQ | |
| | | | GQSLEWIGYIYPY | | KPGKAPKLLMYAAS | |
| | | | NGGTDYNQKFKNR | | NQGSGVPSRFSGSG | |
| | | | ATLTVDNPTNTAY | | SGTEFTLTISSLQP | |
| | | | MELSSLRSEDTDF | | DDFATYYCQQTKEV | |
| | | | YYCVNGNPWLAYW | | PWSFGQGTKVEVKR | |
| | | | GQGTLVTVSSAST | | T | |
| | | | KGP | | | |
| Daratumumab | | CD38 | EVQLLESGGGLVQ | 448 | EIVLTQSPATLSLS | 527 |
| | | | PGGSLRLSCAVSG | | PGERATLSCRASQS | |
| | | | FTFNSFAMSWVRQ | | VSSYLAWYQQKPGQ | |
| | | | APGKGLEWVSAIS | | APRLLIYDASNRAT | |
| | | | GSGGGTYYADSVK | | GIPARFSGSGSGTD | |
| | | | GRFTISRDNSKNT | | FTLTISSLEPEDFA | |
| | | | LYLQMNSLRAEDT | | VYYCQQRSNWPPTF | |
| | | | AVYFCAKDKILWF | | GQGTKVEIK | |
| | | | GEPVFDYWGQGTL | | | |
| | | | VTVSS | | | |
| CE-355621 | | cMET | QVQLVQSGAEVKK | 449 | DIQMTQSPSSVSAS | 528 |
| | | | PGASVKVSCKASG | | VGDRVTITCRASQG | |
| | | | YTFTSYGFSWVRQ | | INTWLAWYQQKPGK | |
| | | | APGQGLEWMGWIS | | APKLLIYAASSLKS | |
| | | | ASNGNTYYAQKLQ | | GVPSRFSGSGSGTD | |
| | | | GRVTMTTDTSTST | | FTLTISSLQPEDFA | |
| | | | AYMELRSLRSDDT | | TYYCQQANSFPLTF | |
| | | | AVYYCARVYADYA | | GGGTKVEIK | |
| | | | DYWGQGTLVTVSS | | | |
| LY2875358 | emibetuzumab | cMET | QVQLVQSGAEVKK | 450 | DIQMTQSPSSLSAS | 529 |
| | | | PGASVKVSCKASG | | VGDRVTITCSVSSS | |
| | | | YTFTDYYMHWVRQ | | VSSIYLHWYQQKPG | |
| | | | APGQGLEWMGRVN | | KAPKLLIYSTSNLA | |
| | | | PNRRGTTYNQKFE | | SGVPSRFSGSGSGT | |
| | | | GRVTMTTDTSTST | | DFTLTISSLQPEDF | |
| | | | AYMELRSLRSDDT | | ATYYCQVYSGYPLT | |
| | | | AVYYCARANWLDY | | FGGGTKVEIK | |
| | | | WGQGTTVTVSS | | | |
| MetMAb | onartuzumab | cMET | EVQLVESGGGLVQ | 451 | DIQMTQSPSSLSAS | 530 |
| | | | PGGSLRLSCAASG | | VGDRVTITCKSSQS | |
| | | | YTFTSYWLHWVRQ | | LLYTSSQKNYLAWY | |
| | | | APGKGLEWVGMID | | QQKPGKAPKLLIYW | |
| | | | PSNSDTRFNPNFK | | ASTRESGVPSRFSG | |
| | | | DRFTISADTSKNT | | SGSGTDFTLTISSL | |
| | | | AYLQMNSLRAEDT | | QPEDFATYYCQQYY | |
| | | | AVYYCATYRSYVT | | AYPWTFGQGTKVEI | |
| | | | PLDYWGQGTLVTV | | KR | |
| | | | SSA | | | |
| | tremelimumab | CTLA4 | QVQLVESGGGVVQ | 452 | DIQMTQSPSSLSAS | 531 |
| | (CP-675206, | | PGRSLRLSCAASG | | VGDRVTITCRASQS | |
| | or 11.2.1) | | FTFSSYGMHWVRQ | | INSYLDWYQQKPGK | |
| | | | APGKGLEWVAVIW | | APKLLIYAASSLQS | |
| | | | YDGSNKYYADSVK | | GVPSRFSGSGSGTD | |
| | | | GRFTISRDNSKNT | | FTLTISSLQPEDFA | |
| | | | LYLQMNSLRAEDT | | TYYCQQYYSTPFTF | |
| | | | AVYYCARDPRGAT | | GPGTKVEIKR | |
| | | | LYYYYYGMDVWGQ | | | |
| | | | GTTVTVSS | | | |
| Yervoy | Ipilimumab | CTLA4 | QVQLVESGGGVVQ | 453 | EIVLTQSPGTLSLS | 532 |
| | 10D1 | | PGRSLRLSCAASG | | PGERATLSCRASQS | |
| | | | FTFSSYTMHWVRQ | | VGSSYLAWYQQKPG | |
| | | | APGKGLEWVTFIS | | QAPRLLIYGAFSRA | |
| | | | YDGNNKYYADSVK | | TGIPDRFSGSGSGT | |
| | | | GRFTISRDNSKNT | | DFTLTISRLEPEDF | |
| | | | LYLQMNSLRAEDT | | AVYYCQQYGSSPWT | |
| | | | AIYYCARTGWLGP | | FGQGTKVEIK | |
| | | | FDYWGQGTLVTVS | | | |
| | | | S | | | |
| MT110 | solitomab | EpCAM | EVQLLEQSGAELV | 454 | ELVMTQSPSSLTVT | 533 |
| | | | RPGTSVKISCKAS | | AGEKVTMSCKSSQS | |
| | | | GYAFTNYWLGWVK | | LLNSGNQKNYLTWY | |
| | | | QRPGHGLEWIGDI | | QQKPGQPPKLLIYW | |
| | | | FPGSGNIHYNEKF | | ASTRESGVPDRFTG | |
| | | | KGKATLTADKSSS | | SGSGTDFTLTISSV | |
| | | | TAYMQLSSLTFED | | QAEDLAVYYCQNDY | |
| | | | SAVYFCARLRNWD | | SYPLTFGAGTKLEI | |
| | | | EPMDYWGQGTTVT | | K | |
| | | | VSS | | | |
| MT201 | Adecatumumab | EpCAM | EVQLLESGGGVVQ | 455 | ELQMTQSPSSLSAS | 534 |
| | | | PGRSLRLSCAASG | | VGDRVTITCRTSQS | |
| | | | FTFSSYGMHWVRQ | | ISSYLNWYQQKPGQ | |
| | | | APGKGLEWVAVIS | | PPKLLIYWATRES | |
| | | | YDGSNKYYADSVK | | GVPDRESGSGSGTD | |
| | | | GRFTISRDNSKNT | | FTLTISSLQPEDSA | |
| | | | LYLQMNSLRAEDT | | TYYCOQSYDIPYTF | |
| | | | AVYYCAKDMGWGS | | GQGTKLEIK | |
| | | | GWRPYYYYGMDVW | | | |
| | | | GQGTTVTVSS | | | |
| Panorex | Edrecolomab | EpCAM | QVQLQQSGAELVR | 456 | NIVMTQSPKSMSMS | 535 |
| | Mab CO17- | | PGTSVKVSCKASG | | VGERVTLTCKASEN | |
| | 1A | | YAFTNYLIEWVKQ | | VVTYVSWYQQKPEQ | |
| | | | RPGQGLEWIGVIN | | SPKLLIYGASNRYT | |
| | | | PGSGGTNYNEKFK | | GVPDRFTGSGSATD | |
| | | | GKATLTADKSSST | | FTLTISSVQAEDLA | |
| | | | AYMQLSSLTSDDS | | DYHCGQGYSYPYTF | |
| | | | AVYFCARDGPWFA | | GGGTKLEIK | |
| | | | YWGQGTLVTVSA | | | |
| | tucotuzumab | EpCAM | QIQLVQSGPELKK | 457 | QILLTQSPAIMSAS | 536 |
| | | | PGETVKISCKASG | | PGEKVTMTCSASSS | |
| | | | YTFTNYGMNWVRQ | | VSYMLWYQQKPGSS | |
| | | | APGKGLKWMGWIN | | PKPWIFDTSNLASG | |
| | | | TYTGEPTYADDFK | | FPARFSGSGSGTSY | |
| | | | GRFVFSLETSAST | | SLIISSMEAEDAAT | |
| | | | AFLQLNNLRSEDT | | YYCHQRSGYPYTFG | |
| | | | ATYFCVRFISKGD | | GGTKLEIK | |
| | | | YWGQGTSVTVSS | | | |
| UBS-54 | | EpCAM | VQLQQSDAELVKP | 458 | DIVMTQSPDSLAVS | 537 |
| | | | GASVKISCKASGY | | LGERATINCKSSQS | |
| | | | TFTDHAIHWVKQN | | VLYSSNNKNYLAWY | |
| | | | PEQGLEWIGYFSP | | QQKPGQPPKLLIYW | |
| | | | GNDDFKYNERFKG | | ASTRESGVPDRFSG | |
| | | | KATLTADKSSSTA | | SGSGTDFTLTISSL | |
| | | | YVQLNSLTSEDSA | | QAEDVAVYYCQQYY | |
| | | | VYFCTRSLNMAYW | | SYPLTFGGGTKVKE | |
| | | | GQGTSVTVS | | SGSVSS | |
| 3622W94 | | EpCAM | EVQLVQSGPEVKK | 459 | DIVMTQSPLSLPVT | 538 |
| | | | PGASVKVSCKASG | | PGEPASISCRSSIN | |
| | | | YTFTNYGMNWVRQ | | KKGSNGITYLYWYL | |
| | | | APGQGLEWMGWIN | | QKPGQSPQLLIYQM | |
| | | | TYTGEPTYGEDFK | | SNLASGVPDRFSGS | |
| | | | GRFAFSLDTSAST | | GSGTDFTLKISRVE | |
| | | | AYMELSSLRSEDT | | AEDVGVYYCAQNLE | |
| | | | AVYFCARFGNYVD | | IPRTFGQGTKVEIK | |
| | | | YWGQGSLVTVSS | | R | |
| 4D5MOCB | | EpCAM | EVQLVQSGPGLVQ | 460 | DIQMTQSPSSLSAS | 539 |
| | | | PGGSVRISCAASG | | VGDRVTITCRSTKS | |
| | | | YTFTNYGMNWVKQ | | LLHSNGITYLYWYQ | |
| | | | APGKGLEWMGWIN | | QKPGKAPKLLIYQM | |
| | | | TYTGESTYADSFK | | SNLASGVPSRFSSS | |
| | | | GRFTFSLDTSASA | | GSGTDFTLTISSLQ | |
| | | | AYLQINSLRAEDT | | PEDFATYYCAQNLE | |
| | | | AVYYCARFAIKGD | | IPRTFGQGTKVEIK | |
| | | | YWGQGTLLTVSS | | R | |
| MEDI-547 | 1C1 | EphA2 | EVQLLESGGGLVQ | 461 | DIQMTQSPSSLSAS | 540 |
| | | | PGGSLRLSCAASG | | VGDRVTITCRASQS | |
| | | | FTFSHYMMAWVRQ | | ISTWLAWYQQKPGK | |
| | | | APGKGLEWVSRIG | | APKLLIYKASNLHT | |
| | | | PSGGPTHYADSVK | | GVPSRFSGSGSGTE | |
| | | | GRFTISRDNSKNT | | FSLTISGLQPDDFA | |
| | | | LYLQMNSLRAEDT | | TYYCQQYNSYSRTF | |
| | | | AVYYCAGYDSGYD | | GQGTKVEIKR | |
| | | | YVAVAGPAEYFQH | | | |
| | | | WGQGTLVTVSSA | | | |
| MORAb- | farletuzumab | FOLR1 | EVQLVESGGGVVQ | 462 | DIQLTQSPSSLSAS | 541 |
| 003 | | | PGRSLRLSCSASG | | VGDRVTITCSVSSS | |
| | | | FTFSGYGLSWVRQ | | ISSNNLHWYQQKPG | |
| | | | APGKGLEWVAMIS | | KAPKPWIYGTSNLA | |
| | | | SGGSYTYYADSVK | | SGVPSRFSGSGSGT | |
| | | | GRFAISRDNAKNT | | DYTFTISSLQPEDI | |
| | | | LFLQMDSLRPEDT | | ATYYCQQWSSYPYM | |
| | | | GVYFCARHGDDPA | | YTFGQGTKVEIK | |
| | | | WFAYWGQGTPVTV | | | |
| | | | SS | | | |
| M9346A | huMOV19 | FOLR1 | QVQLVQSGAEVVK | 463 | DIVLTQSPLSLAVS | 542 |
| | (vLCv1.00) | | PGASVKISCKASG | | LGQPAIISCKASQS | |
| | | | YTFTGYFMNWVKQ | | VSFAGTSLMHWYHQ | |
| | | | SPGQSLEWIGRIH | | KPGQQPRLLIYRAS | |
| | | | PYDGDTFYNQKFQ | | NLEAGVPDRFSGSG | |
| | | | GKATLTVDKSSNT | | SKTDFTLNISPVEA | |
| | | | AHMELLSLTSEDF | | EDAATYYCQQSREY | |
| | | | AVYYCTRYDGSRA | | PYTFGGGTKLEIKR | |
| | | | MDYWGQGTTVTVS | | | |
| | | | S | | | |
| M9346A | huMOV19 | FOLR1 | QVQLVQSGAEVVK | 464 | DIVLTQSPLSLAVS | 543 |
| | (vLCv1.60) | | PGASVKISCKASG | | LGQPAIISCKASQS | |
| | | | YTFTGYFMNWVKQ | | VSFAGTSLMHWYHQ | |
| | | | SPGQSLEWIGRIH | | KPGQQPRLLIYRAS | |
| | | | PYDGDTFYNQKFQ | | NLEAGVPDRFSGSG | |
| | | | GKATLTVDKSSNT | | SKTDFTLTISPVEA | |
| | | | AHMELLSLTSEDF | | EDAATYYCQQSREY | |
| | | | AVYYCTRYDGSRA | | PYTFGGGTKLEIKR | |
| | | | MDYWGQGTTVTVS | | | |
| | | | S | | | |
| 26B3.F2 | | FOLR1 | GPELVKPGASVKI | 465 | PASLSASVGETVTI | 544 |
| | | | SCKASDYSFTGYF | | TCRTSENIFSYLAW | |
| | | | MNWVMQSHGKSLE | | YQQKQGISPQLLVY | |
| | | | WIGRIFPYNGDTF | | NAKTLAEGVPSRFS | |
| | | | YNQKFKGRATLTV | | GSGSGTQFSLKINS | |
| | | | DKSSSTAHMELRS | | LQPEDFGSYYCQHH | |
| | | | LASEDSAVYFCAR | | YAFPWTFGGGSKLE | |
| | | | GTHYFDYWGQGTT | | IK | |
| | | | LTVSS | | | |
| AMG-595 | | Her1(EGFR) | QVQLVESGGGVVQ | 466 | DTVMTQTPLSSHVT | 545 |
| | | | SGRSLRLSCAASG | | LGQPASISCRSSQS | |
| | | | FTFRNYGMHWVRQ | | LVHSDGNTYLSWLQ | |
| | | | APGKGLEWVAVIW | | QRPGQPPRLLIYRI | |
| | | | YDGSDKYYADSVR | | SRRFSGVPDRFSGS | |
| | | | GRFTISRDNSKNT | | GAGTDFTLEISRVE | |
| | | | LYLQMNSLRAEDT | | AEDVGVYYCMQSTH | |
| | | | AVYYCARDGYDIL | | VPRTFGQGTKVEIK | |
| | | | TGNPRDFDYWGQG | | | |
| | | | TLVTVSS | | | |
| Erubitux ™ | cetutximab | Her1(EGFR) | QVQLKQSGPGLVQ | 467 | DILLTQSPVILSVS | 546 |
| | | | PSQSLSITCTVSG | | PGERVSFSCRASQS | |
| | | | FSLTNYGVHWVRQ | | IGTNIHWYQQRTNG | |
| | | | SPGKGLEWLGVIW | | SPRLLIKYASESIS | |
| | | | SGGNTDYNTPFTS | | GIPSRFSGSGSGTD | |
| | | | RLSINKDNSKSQV | | FTLSINSVESEDIA | |
| | | | FFKMNSLQSNDTA | | DYYCQQNNNWPTTF | |
| | | | IYYCARALTYYDY | | GAGTKLELKR | |
| | | | EFAYWGQGTLVTV | | | |
| | | | SAA | | | |
| GA201 | Imgatuzumab | Her1(EGFR) | QVQLVQSGAEVKK | 468 | DIQMTQSPSSLSAS | 547 |
| | | | PGSSVKVSCKASG | | VGDRVTITCRASQG | |
| | | | FTFTDYKIHWVRQ | | INNYLNWYQQKPGK | |
| | | | APGQGLEWMGYFN | | APKRLIYNTNNLQT | |
| | | | PNSGYSTYAQKFQ | | GVPSRFSGSGSGTE | |
| | | | GRVTITADKSTST | | FTLTISSLQPEDFA | |
| | | | AYMELSSLRSEDT | | TYYCLQHNSFPTFG | |
| | | | AVYYCARLSPGGY | | QGTKLEIKRT | |
| | | | YVMDAWGQGTTVT | | | |
| | | | VSS | | | |
| Humax | zalutumumab | Her1 | QVQLVESGGGVVQ | 469 | AIQLTQSPSSLSAS | 548 |
| | | (EGFR) | PGRSLRLSCAASG | | VGDRVTITCRASQD | |
| | | | FTFSTYGMHWVRQ | | ISSALVWYQQKPGK | |
| | | | APGKGLEWVAVIW | | APKLLIYDASSLES | |
| | | | DDGSYKYYGDSVK | | GVPSRFSGSESGTD | |
| | | | GRFTISRDNSKNT | | FTLTISSLQPEDFA | |
| | | | LYLQMNSLRAEDT | | TYYCQQFNSYPLTF | |
| | | | AVYYCARDGITMV | | GGGTKVEIK | |
| | | | RGVMKDYFDYWGQ | | | |
| | | | GTLVTVSS | | | |
| IMC-11F8 | necitumumab | Her1 | QVQLQESGPGLVK | 470 | EIVMTQSPATLSLS | 549 |
| | | (EGFR) | PSQTLSLTCTVSG | | PGERATLSCRASQS | |
| | | | GSISSGDYYWSWI | | VSSYLAWYQQKPGQ | |
| | | | RQPPGKGLEWIGY | | APRLLIYDASNRAT | |
| | | | IYYSGSTDYNPSL | | GIPARFSGSGSGTD | |
| | | | KSRVTMSVDTSKN | | FTLTISSLEPEDFA | |
| | | | QFSLKVNSVTAAD | | VYYCHQYGSTPLTF | |
| | | | TAVYYCARVSIFG | | GGGTKAEIK | |
| | | | VGTFDYWGQGTLV | | | |
| | | | TVSS | | | |
| MM-151 | P1X | Her1 | QVQLVQSGAEVKK | 471 | DIQMTQSPSTLSAS | 550 |
| | | (EGFR) | PGSSVKVSCKASG | | VGDRVTITCRASQS | |
| | | | GTFSSYAISWVRQ | | ISSWWAWYQQKPGK | |
| | | | APGQGLEWMGSII | | APKLLIYDASSLES | |
| | | | PIFGTVNYAQKFQ | | GVPSRFSGSGSGTE | |
| | | | GRVTITADESTST | | FTLTISSLQPDDFA | |
| | | | AYMELSSLRSEDT | | TYYCQQYHAHPTTF | |
| | | | AVYYCARDPSVNL | | GGGTKVEIK | |
| | | | YWYFDLWGRGTLV | | | |
| | | | TVSS | | | |
| MM-151 | P2X | Her1 | QVQLVQSGAEVKK | 472 | DIVMTQSPDSLAVS | 551 |
| | | (EGFR) | PGSSVKVSCKASG | | LGERATINCKSSQS | |
| | | | GTFGSYAISWVRQ | | VLYSPNNKNYLAWY | |
| | | | APGQGLEWMGSII | | QQKPGQPPKLLIYW | |
| | | | PIFGAANPAQKSQ | | ASTRESGVPDRFSG | |
| | | | GRVTITADESTST | | SGSGTDFTLTISSL | |
| | | | AYMELSSLRSEDT | | QAEDVAVYYCQQYY | |
| | | | AVYYCAKMGRGKV | | GSPITFGGGTKVEI | |
| | | | AFDIWGQGTMVTV | | K | |
| | | | SS | | | |
| MM-151 | P3X | Her1 | QVQLVQSGAEVKK | 473 | EIVMTQSPATLSVS | 552 |
| | | (EGFR) | PGASVKVSCKASG | | PGERATLSCRASQS | |
| | | | YAFTSYGINWVRQ | | VSSNLAWYQQKPGQ | |
| | | | APGQGLEWMGWIS | | APRLLIYGASTRAT | |
| | | | AYNGNTYYAQKLR | | GIPARFSGSGSGTE | |
| | | | GRVTMTTDTSTST | | FTLTISSLQSEDFA | |
| | | | AYMELRSLRSDDT | | VYYCQDYRTWPRRV | |
| | | | AVYYCARDLGGYG | | FGGGTKVEIK | |
| | | | SGSVPFDPWGQGT | | | |
| | | | LVTVSS | | | |
| TheraCIM | nimotuzumab | Her1 | QVQLQQSGAEVKK | 474 | DIQMTQSPSSLSAS | 553 |
| | | (EGFR) | PGSSVKVSCKASG | | VGDRVTITCRSSQN | |
| | | | YTFTNYYIYWVRQ | | IVHSNGNTYLDWYQ | |
| | | | APGQGLEWIGGIN | | QTPGKAPKLLIYKV | |
| | | | PTSGGSNFNEKFK | | SNRFSGVPSRFSGS | |
| | | | TRVTITADESSTT | | GSGTDFTFTISSLQ | |
| | | | AYMELSSLRSEDT | | PEDIATYYCFQYSH | |
| | | | AFYFCTRQGLWFD | | VPWTFGQGTKLQIT | |
| | | | SDGRGFDFWGQGT | | | |
| | | | TVTVSS | | | |
| Vectibix ™ | panitumimab | Her1 | QVQLQESGPGLVK | 475 | DIQMTQSPSSLSAS | 554 |
| | | (EGFR) | PSETLSLTCTVSG | | VGDRVTITCQASQD | |
| | | | GSVSSGDYYWTWI | | ISNYLNWYQQKPGK | |
| | | | RQSPGKGLEWIGH | | APKLLIYDASNLET | |
| | | | IYYSGNTNYNPSL | | GVPSRFSGSGSGTD | |
| | | | KSRLTISIDTSKT | | FTFTISSLQPEDIA | |
| | | | QFSLKLSSVTAAD | | TYFCQHFDHLPLAF | |
| | | | TAIYYCVRDRVTG | | GGGTKVEIKR | |
| | | | AFDIWGQGTMVTV | | | |
| | | | SSA | | | |
| 07D06 | | Her1 | QIQLVQSGPELKK | 476 | DVVMTQTPLSLPVS | 555 |
| | | (EGFR) | PGETVKISCKASG | | LGDQASISCRSSQS | |
| | | | YTFTEYPIHWVKQ | | LVHSNGNTYLHWYL | |
| | | | APGKGFKWMGMIY | | QKPGQSPKLLIYKV | |
| | | | TDIGKPTYAEEFK | | SNRFSGVPDRFSGS | |
| | | | GRFAFSLETSAST | | GSGTDFTLKISRVE | |
| | | | AYLQINNLKNEDT | | AEDLGVYFCSQSTH | |
| | | | ATYFCVRDRYDSL | | VPWTFGGGTKLEIK | |
| | | | FDYWGQGTTLTVS | | | |
| | | | S | | | |
| 12D03 | | Her1 | EMQLVESGGGFVK | 477 | DVVMTQTPLSLPVS | 556 |
| | | (EGFR) | PGGSLKLSCAASG | | LGDQASISCRSSQS | |
| | | | FAFSHYDMSWVRQ | | LVHSNGNTYLHWYL | |
| | | | TPKQRLEWVAYIA | | QKPGQSPKLLIYKV | |
| | | | SGGDITYYADTVK | | SNRFSGVPDRFSGS | |
| | | | GRFTISRDNAQNT | | GSGTDFTLKISRVE | |
| | | | LYLQMSSLKSEDT | | AEDLGVYFCSQSTH | |
| | | | AMFYCSRSSYGNN | | VLTFGSGTKLEIK | |
| | | | GDALDFWGQGTSV | | | |
| | | | TVSS | | | |
| | C1 | Her2 | QVQLVESGGGLVQ | 478 | QSPSFLSAFVGDRI | 557 |
| | | | PGGSLRLSCAASG | | TITCRASPGIRNYL | |
| | | | FTFSSYAMGWVRQ | | AWYQQKPGKAPKLL | |
| | | | APGKGLEWVSSIS | | IYAASTLQSGVPSR | |
| | | | GSSRYIYYADSVK | | FSGSGSGTDFTLTI | |
| | | | GRFTISRDNSKNT | | SSLQPEDFATYYCQ | |
| | | | LYLQMNSLRAEDT | | QYNSYPLSFGGGTK | |
| | | | AVYYCAKMDASGS | | VEIKR | |
| | | | YFNFWGQGTLVTV | | | |
| | | | SS | | | |
| Erbicin | | Her2 | QVQLLQSAAEVKK | 479 | QAVVTQEPSFSVSP | 558 |
| | | | PGESLKISCKGSG | | GGTVTLTCGLSSGS | |
| | | | YSFTSYWIGWVRQ | | VSTSYYPSWYQQTP | |
| | | | MPGKGLEWMGITY | | GQAPRTLIYSTNTR | |
| | | | PGDSDTRYSPSFQ | | SSGVPDRFSGSILG | |
| | | | GQVTISADKSIST | | NKAALTITGAQADD | |
| | | | AYLQWSSLKASDT | | ESDYYCVLYMGSGQ | |
| | | | AVYYCARWRDSPL | | YVFGGGTKLTVLG | |
| | | | WGQGTLVTVSS | | | |
| Herceptin | trastuzumab | Her2 | EVQLVESGGGLVQ | 480 | DIQMTQSPSSLSAS | 559 |
| | | | PGGSLRLSCAASG | | VGDRVTITCRASQD | |
| | | | FNIKDTYIHWVRQ | | VNTAVAWYQQKPGK | |
| | | | APGKGLEWVARIY | | APKLLIYSASFLYS | |
| | | | PTNGYTRYADSVK | | GVPSRFSGSRSGTD | |
| | | | GRFTISADTSKNT | | FTLTISSLQPEDFA | |
| | | | AYLQMNSLRAEDT | | TYYCQQHYTTPPTF | |
| | | | AVYYCSRWGGDGF | | GQGTKVEIKR | |
| | | | YAMDYWGQGTLVT | | | |
| | | | VSSA | | | |
| MAGH22 | margetuximab | Her2 | QVQLQQSGPELVK | 481 | DIVMTQSHKFMSTS | 560 |
| | | | PGASLKLSCTASG | | VGDRVSITCKASQD | |
| | | | FNIKDTYIHWVKQ | | VNTAVAWYQQKPGH | |
| | | | RPEQGLEWIGRIY | | SPKLLIYSASFRYT | |
| | | | PTNGYTRYDPKFQ | | GVPDRFTGSRSGTD | |
| | | | DKATITADTSSNT | | FTFTISSVQAEDLA | |
| | | | AYLQVSRLTSEDT | | VYYCQQHYTTPPTF | |
| | | | AVYYCSRWGGDGF | | GGGTKVEIK | |
| | | | YAMDYWGQGASVT | | | |
| | | | VSS | | | |
| MM-302 | F5 | Her2 | QVQLVESGGGLVQ | 482 | QSVLTQPPSVSGAP | 561 |
| | | | PGGSLRLSCAASG | | GQRVTISCTGSSSN | |
| | | | FTFRSYAMSWVRQ | | IGAGYGVHWYQQLP | |
| | | | APGKGLEWVSAIS | | GTAPKLLIYGNTNR | |
| | | | GRGDNTYYADSVK | | PSGVPDRFSGFKSG | |
| | | | GRFTISRDNSKNT | | TSASLAITGLQAED | |
| | | | LYLQMNSLRAEDT | | EADYYCQFYDSSLS | |
| | | | AVYYCAKMTSNAF | | GWVFGGGTKLTVLG | |
| | | | AFDYWGQGTLVTV | | | |
| | | | SS | | | |
| Perjeta | pertuzumab | Her2 | EVQLVESGGGLVQ | 483 | DIQMTQSPSSLSAS | 562 |
| | | | PGGSLRLSCAASG | | VGDRVTITCKASQD | |
| | | | FTFTDYTMDWVRQ | | VSIGVAWYQQKPGK | |
| | | | APGKGLEWVADVN | | APKLLIYSASYRYT | |
| | | | PNSGGSIYNQRFK | | GVPSRFSGSGSGTD | |
| | | | GRFTLSVDRSKNT | | FTLTISSLQPEDFA | |
| | | | LYLQMNSLRAEDT | | TYYCQQYYIYPYTF | |
| | | | AVYYCARNLGPSF | | GQGTKVEIKRT | |
| | | | YFDYWGQGTLVTV | | | |
| | | | SS | | | |
| MM-121/ | | Her3 | EVQLLESGGGLVQ | 484 | QSALTQPASVSGSP | 563 |
| SAR256212 | | | PGGSLRLSCAASG | | GQSITISCTGTSSD | |
| | | | FTFSHYVMAWVRQ | | VGSYNVVSWYQQHP | |
| | | | APGKGLEWVSSIS | | GKAPKLIIYEVSQR | |
| | | | SSGGWTLYADSVK | | PSGVSNRFSGSKSG | |
| | | | GRFTISRDNSKNT | | NTASLTISGLQTED | |
| | | | LYLQMNSLRAEDT | | EADYYCCSYAGSSI | |
| | | | AVYYCTRGLKMAT | | FVIFGGGTKVTVL | |
| | | | IFDYWGQGTLVTV | | | |
| | | | SS | | | |
| MEHD794 | Duligotumab | Her1 | EVQLVESGGGLVQ | 485 | DIQMTQSPSSLSAS | 564 |
| 5A | | (EGFR)/ | PGGSLRLSCAASG | | VGDRVTITCRASQN | |
| | | Her3 | FTLSGDWIHWVRQ | | IATDVAWYQQKPGK | |
| | | | APGKGLEWVGEIS | | APKLLIYSASFLYS | |
| | | | AAGGYTDYADSVK | | GVPSRFSGSGSGTD | |
| | | | GRFTISADTSKNT | | FTLTISSLQPEDFA | |
| | | | AYLQMNSLRAEDT | | TYYCQQSEPEPYTF | |
| | | | AVYYCARESRVSF | | GQGTKVEIKR | |
| | | | EAAMDYWGQGTLV | | | |
| | | | TVSS | | | |
| MM-111 | | Her2/3 | QVQLQESGGGLVK | 486 | QSALTQPASVSGSP | 565 |
| | | | PGGSLRLSCAASG | | GQSITISCTGTSSD | |
| | | | FTFSSYWMSWVRQ | | VGGYNFVSWYQQHP | |
| | | | APGKGLEWVANIN | | GKAPKLMIYDVSDR | |
| | | | RDGSASYYVDSVK | | PSGVSDRFSGSKSG | |
| | | | GRFTISRDDAKNS | | NTASLIISGLQADD | |
| | | | LYLQMNSLRAEDT | | EADYYCSSYGSSST | |
| | | | AVYYCARDRGVGY | | HVIFGGGTKVTVLG | |
| | | | FDLWGRGTLVTVS | | | |
| | | | S | | | |
| MM-111 | | Her2/3 | QVQLVQSGAEVKK | 487 | QSVLTQPPSVSAAP | 566 |
| | | | PGESLKISCKGSG | | GQ | |
| | | | YSFTSYWIAWVRQ | | KVTISCSGSSSNIG | |
| | | | MPGKGLEYMGLIY | | NNYVSWYQQLPGTA | |
| | | | PGDSDTKYSPSFQ | | PKLLIYDHTNRPAG | |
| | | | GQVTISVDKSVST | | VPDRFSGSKSGTSA | |
| | | | AYLQWSSLKPSDS | | SLATSGFRSEDEAD | |
| | | | AVYFCARHDVGYC | | YYCASWDYTLSGWV | |
| | | | TDRTCAKWPEWLG | | FGGGTKLTVLG | |
| | | | VWGQGTLVTVSS | | | |
| BAY 94- | anetumab | Mesothelin | QVELVQSGAEVKK | 488 | DIALTQPASVSGSP | 567 |
| 9343 | ravtansine | | PGESLKISCKGSG | | GQSITISCTGTSSD | |
| | | | YSFTSYWIGWVRQ | | IGGYNSVSWYQQHP | |
| | | | APGKGLEWMGIID | | GKAPKLMIYGVNNR | |
| | | | PGDSRTRYSPSFQ | | PSGVSNRFSGSKSG | |
| | | | GQVTISADKSIST | | NTASLTISGLQAED | |
| | | | AYLQWSSLKASDT | | EADYYCSSYDIESA | |
| | | | AMYYCARGQLYGG | | TPVFGGGTKLTVL | |
| | | | TYMDGWGQGTLVT | | | |
| | | | VSS | | | |
| MORAb- | amatuximab | Mesothelin | QVQLQQSGPELEK | 489 | DIELTQSPAIMSAS | 568 |
| 009 | | | PGASVKISCKASG | | PGEKVTMTCSASSS | |
| | | | YSFTGYTMNWVKQ | | VSYMHWYQQKSGTS | |
| | | | SHGKSLEWIGLIT | | PKRWIYDTSKLASG | |
| | | | PYNGASSYNQKFR | | VPGRFSGSGSGNSY | |
| | | | GKATLTVDKSSST | | SLTISSVEAEDDAT | |
| | | | AYMDLLSLTSEDS | | YYCQQWSKHPLTFG | |
| | | | AVYFCARGGYDGR | | SGTKVEIKR | |
| | | | GFDYWGSGTPVTV | | | |
| | | | SSA | | | |
| hPAM4- | clivatuzumab | MUC1 | QVQLQQSGAEVKK | 490 | DIQLTQSPSSLSAS | 569 |
| Cide | | | FGASVKVSCEASG | | VGDRVTMTCSASSS | |
| | | | YTFPSYVLHWVKQ | | VSSSYLYWYQQKPG | |
| | | | APGQGLEWIGYIN | | KAPKLWIYSTSNLA | |
| | | | PYNDGTQTNKKFK | | SGVPARFSGSGSGT | |
| | | | GKATLTRDTSINT | | DFTLTISSLQPEDS | |
| | | | AYMELSRLRSDDT | | ASYFCHQWNRYPYT | |
| | | | AVYYCARGFGGSY | | FGGGTRLEIK | |
| | | | GFAYNGQGTLVTV | | | |
| | | | SS | | | |
| SAR566658 | huDS6v1.01 | MUC1 | QAQLQVSGAEVVK | 491 | EIVLTQSPATMSAS | 570 |
| | | | PGASVKMSCKASG | | PGERVTITCSAHSS | |
| | | | YTFTSYNMHWVKQ | | VSFMHWFQQKPGTS | |
| | | | TPGQGLEWIGYIY | | PKLWIYSTSSLASG | |
| | | | PGNGATNYNQKFQ | | VPARFGGSGSGTSY | |
| | | | GKATLTADTSSST | | SLTISSMEAEDAAT | |
| | | | AYMQISSLTSEDS | | YYCQQRSSFPLTFG | |
| | | | AVYFCARGDSVPF | | AGTKLELKR | |
| | | | AYWGQGTLVTVSA | | | |
| Theragyn | Pemtumomab | MUC1 | QVQLQQSGAELMK | 492 | DIVMSQSPSSLAVS | 571 |
| | muHMFG1 | | PGASVKISCKATG | | VGEKVTMSCKSSQS | |
| | | | YTFSAYWIEWVKQ | | LLYSSNQKIYLAWY | |
| | | | RPGHGLEWIGEIL | | QQKPGQSPKLLIYW | |
| | | | PGSNNSRYNEKFK | | ASTRESGVPDRFTG | |
| | | | GKATFTADTSSNT | | GGSGTDFTLTISSV | |
| | | | AYMQLSSLTSEDS | | KAEDLAVYYCQQYY | |
| | | | AVYYCSRSYDFAW | | RYPRTFGGGTKLEI | |
| | | | FAYWGQGTPVTVS | | KR | |
| | | | A | | | |
| Therex | Sontuzumab | MUC1 | QVQLVQSGAEVKK | 493 | DIQMTQSPSSLSAS | 572 |
| | huHMFG1 | | PGASVKVSCKASG | | VGDRVTITCKSSQS | |
| | AS1402 | | YTFSAYWIEWVRQ | | LLYSSNQKIYLAWY | |
| | R1150 | | APGKGLEWVGEIL | | QQKPGKAPKLLIYW | |
| | | | PGSNNSRYNEKFK | | ASTRESGVPSRFSG | |
| | | | GRVTVTRDTSTNT | | SGSGTDFTFTISSL | |
| | | | AYMELSSLRSEDT | | QPEDIATYYCQQYY | |
| | | | AVYYCARSYDFAW | | RYPRTFGQGTKVEI | |
| | | | FAYWGQGTLVTVS | | KR | |
| | | | S | | | |
| MDX-1105 | | PD-L1 | QVQLVQSGAEVKK | 494 | EIVLTQSPATLSLS | 573 |
| or BMS- | | | PGSSVKVSCKTSG | | PGERATLSCRASQS | |
| 936559 | | | DTFSTYAISWVRQ | | VSSYLAWYQQKPGQ | |
| | | | APGQGLEWMGGII | | APRLLIYDASNRAT | |
| | | | PIFGKAHYAQKFQ | | GIPARFSGSGSGTD | |
| | | | GRVTITADESTST | | FTLTISSLEPEDFA | |
| | | | AYMELSSLRSEDT | | VYYCQQRSNWPTFG | |
| | | | AVYFCARKFHFVS | | QGTKVEIK | |
| | | | GSPFGMDVWGQGT | | | |
| | | | TVTVSS | | | |
| MEDI- | durvalumab | PD-L1 | EVQLVESGGGLVQ | 495 | EIVLTQSPGTLSLS | 574 |
| 4736 | | | PGGSLRLSCAASG | | PGERATLSCRASQR | |
| | | | FTFSRYWMSWVRQ | | VSSSYLAWYQQKPG | |
| | | | APGKGLEWVANIK | | QAPRLLIYDASSRA | |
| | | | QDGSEKYYVDSVK | | TGIPDRFSGSGSGT | |
| | | | GRFTISRDNAKNS | | DFTLTISRLEPEDF | |
| | | | LYLQMNSLRAEDT | | AVYYCQQYGSLPWT | |
| | | | AVYYCAREGGWFG | | FGQGTKVEIK | |
| | | | ELAFDYWGQGTLV | | | |
| | | | TVSS | | | |
| MPDL3280A | atezolizumab | PD-L1 | EVQLVESGGGLVQ | 496 | DIQMTQSPSSLSAS | 575 |
| | | | PGGSLRLSCAASG | | VGDRVTITCRASQD | |
| | | | FTFSDSWIHWVRQ | | VSTAVAWYQQKPGK | |
| | | | APGKGLEWVAWIS | | APKLLIYSASFLYS | |
| | | | PYGGSTYYADSVK | | GVPSRFSGSGSGTD | |
| | | | GRFTISADTSKNT | | FTLTISSLQPEDFA | |
| | | | AYLQMNSLRAEDT | | TYYCQQYLYHPATF | |
| | | | AVYYCARRHWPGG | | GQGTKVEIK | |
| | | | FDYWGQGTLVTVS | | | |
| | | | S | | | |
| MSB00107 | avelumab | PD-L1 | EVQLLESGGGLVQ | 497 | QSALTQPASVSGSP | 576 |
| 18C | | | PGGSLRLSCAASG | | GQSITISCTGTSSD | |
| | | | FTFSSYIMMWVRQ | | VGGYNYVSWYQQHP | |
| | | | APGKGLEWVSSTY | | GKAPKLMIYDVSNR | |
| | | | PSGGITFYADTVK | | PSGVSNRFSGSKSG | |
| | | | GRFTISRDNSKNT | | NTASLTISGLQAED | |
| | | | LYLQMNSLRAEDT | | EADYYCSSYTSSST | |
| | | | AVYYCARIKLGTV | | RVFGTGTKVTVL | |
| | | | TTVDYWGQGTLVT | | | |
| | | | VSS | | | |
| MLN591 | | PSMA | EVQLVQSGPEVKK | 498 | DIQMTQSPSSLSTS | 577 |
| | | | PGATVKISCKTSG | | VGDRVTLTCKASQD | |
| | | | YTFTEYTIHWVKQ | | VGTAVDWYQQKPGP | |
| | | | APGKGLEWIGNIN | | SPKLLIYWASTRHT | |
| | | | PNNGGTTYNQKFE | | GIPSRFSGSGSGTD | |
| | | | DKATLTVDKSTDT | | FTLTISSLQPEDFA | |
| | | | AYMELSSLRSEDT | | DYYCQQYNSYPLTF | |
| | | | AVYYCAAGWNFDY | | GPGTKVDIK | |
| | | | WGQGTLLTVSS | | | |
| MT112 | pasotuxizumab | PSMA | QVQLVESGGGLVK | 499 | DIQMTQSPSSLSAS | 578 |
| | | | PGESLRLSCAASG | | VGDRVTITCKASQN | |
| | | | FTFSDYYMYWVRQ | | VDTNVAWYQQKPGQ | |
| | | | APGKGLEWVAIIS | | APKSLIYSASYRYS | |
| | | | DGGYYTYYSDIIK | | DVPSRFSGSASGTD | |
| | | | GRFTISRDNAKNS | | FTLTISSVQSEDFA | |
| | | | LYLQMNSLKAEDT | | TYYCQQYDSYPYTF | |
| | | | AVYYCARGFPLLR | | GGGTKLEIK | |
| | | | HGAMDYWGQGTLV | | | |
| | | | TVSS | | | |
| CC49 | | TAG-72 | QVQLVQSGAEVVK | 500 | DIVMSQSPDSLAVS | 579 |
| (Humanized) | | | PGASVKISCKASG | | LGERVTLNCKSSQS | |
| | | | YTFTDHAIHWVKQ | | LLYSGNQKNYLAWY | |
| | | | NPGQRLEWIGYFS | | QQKPGQSPKLLIYW | |
| | | | PGNDDFKYNERFK | | ASARESGVPDRFSG | |
| | | | GKATLTADTSAST | | SGSGTDFTLTISSV | |
| | | | AYVELSSLRSEDT | | QAEDVAVYYCQQYY | |
| | | | AVYFCTRSLNMAY | | SYPLTFGAGTKLEL | |
| | | | WGQGTLVTVSS | | K | |
| IMC-18F1 | icrucumab | VEGFR1 | QAQVVESGGGVVQ | 501 | EIVLTQSPGTLSLS | 580 |
| | | | SGRSLRLSCAASG | | PGERATLSCRASQS | |
| | | | FAFSSYGMHWVRQ | | VSSSYLAWYQQKPG | |
| | | | APGKGLEWVAVIW | | QAPRLLIYGASSRA | |
| | | | YDGSNKYYADSVR | | TGIPDRFSGSGSGT | |
| | | | GRFTISRDNSENT | | DFTLTISRLEPEDF | |
| | | | LYLQMNSLRAEDT | | AVYYCQQYGSSPLT | |
| | | | AVYYCARDHYGSG | | FGGGTKVEIK | |
| | | | VHHYFYYGLDVWG | | | |
| | | | QGTTVTVSS | | | |
| Cyramza | ramucirumab | VEGFR2 | EVQLVQSGGGLVK | 502 | DIQMTQSPSSVSAS | 581 |
| | | | PGGSLRLSCAASG | | IGDRVTITCRASQG | |
| | | | FTFSSYSMNWVRQ | | IDNWLGWYQQKPGK | |
| | | | APGKGLEWVSSIS | | APKLLIYDASNLDT | |
| | | | SSSSYIYYADSVK | | GVPSRFSGSGSGTY | |
| | | | GRFTISRDNAKNS | | FTLTISSLQAEDFA | |
| | | | LYLQMNSLRAEDT | | VYFCQQAKAFPPTF | |
| | | | AVYYCARVTDAFD | | GGGTKVDIKR | |
| | | | IWGQGTMVTVSSA | | | |
| g165 DFM- | alacizumab | VEGFR2 | EVQLVESGGGLVQ | 503 | DIQMTQSPSSLSAS | 582 |
| PEG | pegol | | PGGSLRLSCAASG | | VGDRVTITCRASQD | |
| | | | FTFSSYGMSWVRQ | | IAGSLNWLQQKPGK | |
| | | | APGKGLEWVATIT | | AIKRLIYATSSLDS | |
| | | | SGGSYTYYVDSVK | | GVPKRFSGSRSGSD | |
| | | | GRFTISRDNAKNT | | YTLTISSLQPEDFA | |
| | | | LYLQMNSLRAEDT | | TYYCLQYGSFPPTF | |
| | | | AVYYCVRIGEDAL | | GQGTKVEIK | |
| | | | DYWGQGTLVTVSS | | | |
| Imclone | | VEGFR2 | KVQLQQSGTELVK | 504 | DIVLTQSPASLAVS | 583 |
| 6.64 | | | PGASVKVSCKASG | | LGQRATISCRASES | |
| | | | YIFTEYIIHWVKQ | | VDSYGNSFMHWYQQ | |
| | | | RSGQGLEWIGWLY | | KPGQPPKLLIYRAS | |
| | | | PESNIIKYNEKFK | | NLESGIPARFSGSG | |
| | | | DKATLTADKSSST | | SRTDFTLTINPVEA | |
| | | | VYMELSRLTSEDS | | DDVATYYCQQSNED | |
| | | | AVYFCTRHDGTNF | | PLTFGAGTKLELKR | |
| | | | DYWGQGTTLTVSS | | | |
| | | | A | | | |
| huOKT3 | | CD3 | QVQLVQSGGGVVQ | 505 | DIQMTQSPSSLSAS | 584 |
| | | | PGRSLRLSCKASG | | VGDRVTITCSASSS | |
| | | | YTFTRYTMHWVRQ | | VSYMNWYQQTPGKA | |
| | | | APGKGLEWIGYIN | | PKRWIYDTSKLASG | |
| | | | PSRGYTNYNQKVK | | VPSRFSGSGSGTDY | |
| | | | DRFTISRDNSKNT | | TFTISSLQPEDIAT | |
| | | | AFLQMDSLRPEDT | | YYCQQWSSNPFTFG | |
| | | | GVYFCARYYDDHY | | QGTKLQITR | |
| | | | CLDYWGQGTPVTV | | | |
| | | | SS | | | |
| huUCHT1 | | CD3 | EVQLVESGGGLVQ | 506 | DIQMTQSPSSLSAS | 585 |
| | | | PGGSLRLSCAASG | | VGDRVTITCRASQD | |
| | | | YSFTGYTMNWVRQ | | IRNYLNWYQQKPGK | |
| | | | APGKGLEWVALIN | | APKLLIYYTSRLES | |
| | | | PYKGVSTYNQKFK | | GVPSRFSGSGSGTD | |
| | | | DRFTISVDKSKNT | | YTLTISSLQPEDFA | |
| | | | AYLQMNSLRAEDT | | TYYCQQGNTLPWTF | |
| | | | AVYYCARSGYYGD | | GQGTKVEIK | |
| | | | SDWYFDVWGQGTL | | | |
| | | | VTVSS | | | |
| hu12F6 | | CD3 | QVQLVQSGGGVVQ | 507 | DIQMTQSPSSLSAS | 586 |
| | | | PGRSLRLSCKASG | | VGDRVTMTCRASSS | |
| | | | YTFTSYTMHWVRQ | | VSYMHWYQQTPGKA | |
| | | | APGKGLEWIGYIN | | PKPWIYATSNLASG | |
| | | | PSSGYTKYNQKFK | | VPSRFSGSGSGTDY | |
| | | | DRFTISADKSKST | | TLTISSLQPEDIAT | |
| | | | AFLQMDSLRPEDT | | YYCQQWSSNPPTFG | |
| | | | GVYFCARWQDYDV | | QGTKLQITR | |
| | | | YFDYWGQGTPVTV | | | |
| | | | SS | | | |
| mOKT3 | | CD3 | QVQLQQSGAELAR | 508 | QIVLTQSPAIMSAS | 587 |
| | | | PGASVKMSCKASG | | PGEKVTMTCSASSS | |
| | | | YTFTRYTMHWVKQ | | VSYMNWYQQKSGTS | |
| | | | RPGQGLEWIGYIN | | PKRWIYDTSKLASG | |
| | | | PSRGYTNYNQKFK | | VPAHFRGSGSGTSY | |
| | | | DKATLTTDKSSST | | SLTISGMEAEDAAT | |
| | | | AYMQLSSLTSEDS | | YYCQQWSSNPFTFG | |
| | | | AVYYCARYYDDHY | | SGTKLEINR | |
| | | | CLDYWGQGTTLTV | | | |
| | | | SS | | | |
| MT103 | blinatumomab | CD3 | DIKLQQSGAELAR | 509 | DIQLTQSPAIMSAS | 588 |
| | | | PGASVKMSCKTSG | | PGEKVTMTCRASSS | |
| | | | YTFTRYTMHWVKQ | | VSYMNWYQQKSGTS | |
| | | | RPGQGLEWIGYIN | | PKRWIYDTSKVASG | |
| | | | PSRGYTNYNQKFK | | VPYRFSGSGSGTSY | |
| | | | DKATLTTDKSSST | | SLTISSMEAEDAAT | |
| | | | AYMQLSSLTSEDS | | YYCQQWSSNPLTFG | |
| | | | AVYYCARYYDDHY | | AGTKLELK | |
| | | | CLDYWGQGTTLTV | | | |
| | | | SS | | | |
| MT110 | solitomab | CD3 | DVQLVQSGAEVKK | 510 | DIVLTQSPATLSLS | 589 |
| | | | PGASVKVSCKASG | | PGERATLSCRASQS | |
| | | | YTFTRYTMHWVRQ | | VSYMNWYQQKPGKA | |
| | | | APGQGLEWIGYIN | | PKRWIYDTSKVASG | |
| | | | PSRGYTNYADSVK | | VPARFSGSGSGTDY | |
| | | | GRFTITTDKSTST | | SLTINSLEAEDAAT | |
| | | | AYMELSSLRSEDT | | YYCQQWSSNPLTEG | |
| | | | ATYYCARYYDDHY | | GGTKVEIK | |
| | | | CLDYWGQGTTVTV | | | |
| | | | SS | | | |

*underlined sequences, if present, are CDRs within the VL and VH

TABLE 20
Intramolecular Linkers

| Linker | Name | Amino Acid Sequence | SEQ ID NO: |
|---|---|---|---|
| L-1 | Y30 | GSGEGSEGEGGGEGSEGEGSGEGGEGEGSG | 590 |
| L-2 | GS20 | GGGGSGGGGSGGGGSGGGGS | 591 |
| L-3 | GS15 | GGGGSGGGGSGGGGS | 592 |
| L-4 | AE30_1 | AGSPTSTEEGTSESATPESGPGSEPATSGS | 593 |
| L-5 | AE30_2 | GTSTEPSEGSAPGTSESATPESGPGSEPAT | 594 |
| L-6 | AE30_3 | GSETPGTSESATPESGPGTSTEPSEGSAPG | 595 |
| L-7 | AG30_1 | GTGPGTPGSGTASSSPGSSTPSGATGSPGP | 596 |
| L-8 | AG30_2 | GSGTASSSPGSSTPSGATGSPGSSPSASTG | 597 |
| L-9 | AG30_3 | GASPGTSSTGSPGTPGSGTASSSPGSSTPS | 598 |
| L-10 | AG30_4 | GTSSTGSPGTPGSGTASSSPGSSTPSGATG | 599 |

[0297] (i) Exemplary Targeting Moieties

[0298] The following section provides a non-limiting list and description of exemplary targeting moieties and their use in targeted conjugate compositions.

[0299] Anti-Her2:

[0300] In one embodiment, the invention provides an isolated anti-Her2 targeting moiety. “Anti-Her2” means a targeting moiety that specifically binds to the extracellular domain of the HER2/neu receptor (a.k.a. erbB-2 protein), including, but not limited to antibodies, antibody fragments, fragment dimers, traps, and other polypeptides with binding affinity to the extracellular domain of the HER2/erbB-2 protein. In a preferred embodiment, the anti-Her2 targeting moiety is a scFv. The HER2-encoding gene is found on band q21 of chromosome 17, generates a messenger RNA (MRNA) of 4.8 kb, and the protein encoded by the HER2 gene is 185,000 Daltons. In normal subject, ligands that bind to the HER2 receptor promote dimerization with other receptors, resulting in signal transduction and activation of the PI3K/Akt pathway and the MAPK pathway.

[0301] In approximately 25% of breast cancers, the HER2 gene is amplified by 2-fold to greater than 20-fold in each tumor cell nucleus relative to the number of copies of chromosome 17. Amplification of the HER2gene drives protein expression and the resulting increase in the number of receptors at the tumor-cell surface promotes receptor activation, leading to signaling, excessive cellular division, and the formation of tumors (Hicks, D G et al., HER2+ breast cancer: review of biologic relevance and optimal use of diagnostic tools. Am J Clin Pathol. (2008) 129(2):263-73).

[0302] The anti-Her2 targeting moiety used as a fusion partner with XTEN creates a composition that has therapeutic utility when administered to a subject by binding to the extracellular domain of the extracellular segment of the HER2/neu receptor and delivering a bioactive payload to the target tissue. In addition, such binding can interfere with receptor dimerization and the resulting activation of EGFR intrinsic tyrosine kinase function (Yarden et al, Biochemistry, (1988), 27, 3114-3118; Schlessinger, Biochemistry, (1988), 27, 3119-3123), with the result that cells with bound receptors undergo arrest during the G1 phase of the cell cycle so there is reduced proliferation of tumor cells, as well as suppression of angiogenesis.

[0303] One object of the invention is to provide novel anti-Her2 targeting moieties comprising one or more binding moieties that specifically bind to erbB-2 protein expressed on tumor cells and that do not substantially bind to normal human cells, which may be utilized for the treatment or prevention of erbB-2 expressing cancers, or for the detection of erbB-2 expressing tumor cells. The variable domain CDR and FR residues of a humanized HER2 antibody have been reported in Carter et al., Proc. Natl. Acad. Sci. USA, 89:4285 (1992). In one embodiment, the anti-Her2 TM compositions comprise a single anti-Her2 targeting moiety linked to the conjugate composition. In another embodiment, the anti-Her2 compositions comprise a first and a second anti-Her2 targeting moiety, which may be the same or which may bind different epitopes of the erbB-2 protein. In one embodiment, the anti-Her2 targeting moiety component of a conjugate composition comprises one or more complementarity determining regions (CDRs) of trastuzumab capable of binding to the domain IV of the extracellular segment of the HER2/neu receptor linked to the conjugate composition.

[0304] Another embodiment of the invention relates to a method of inhibiting growth of tumor cells by administering to a patient a therapeutically effective amount of anti-Her2-targeted conjugate composition capable of inhibiting the HER2 receptor function and delivering a cytotoxic payload to the tumor cells, thereby effecting death of the cells. In another embodiment, the invention provides a method for the treatment and/or prevention of erbB-2 receptor over-expressing tumors comprising the administration of therapeutically-effective amounts of anti-Her2 conjugate composition comprising a first and a second anti-Her2 binding moiety, which may be identical or which may be distinct and bind different epitopes of the erbB-2 protein, capable of inhibiting the HER2 receptor function. Preferably, such combinations of TM will result in more selective delivery of the associated payload agent to the target tumor and exhibit better cytotoxic activity than would be expected for the sum of the cytotoxic activity of the conjugates with individual TMs at the same overall concentration. Additionally, one or more of the administered conjugate compositions may be conjugated to a radionuclide.

[0305] Anti-cMet:

[0306] In another embodiment, the invention provides an isolated anti-cMet targeting moiety. “Anti-cMet” means a targeting moiety that specifically binds to Met, or hepatocyte growth factor (HGF) receptor. MET is a proto-oncogene, with the encoded hepatocyte growth factor receptor (HGFR) or cMet having tyrosine-kinase activity essential for embryonic development and wound healing. Upon HGF binding and stimulation, MET induces several biological responses that collectively give rise to invasive growth. Abnormal MET activation in cancer correlates with poor prognosis, where aberrantly active MET triggers tumor growth, angiogenesis and formation of new blood vessels that supply the tumor with nutrients, and cancer spread to other organs (metastasis). MET is deregulated in many types of human malignancies, including cancers of kidney, liver, stomach, breast, and brain. Anti-cMET can be an targeting moiety that specifically binds to a HGF receptor, serving as an antagonist to HGF. In a preferred embodiment, the anti-cMET targeting moiety is a scFv. The anti-cMET can be used as a fusion partner to create a fusion protein conjugate composition that has prophylactic or therapeutic utility when administered to a subject for the treatment of MET-expressing tumors. In one embodiment, the anti-cMET component of an conjugate composition comprises one or more complementarity determining regions (CDRs) of the antibody MetMab or PRO143966. Antibodies to cMet and their sequences have been described in U.S. Pat. No. 5,686,292. U.S. Pat. No. 6,468,529 U.S. Pat. No. 7,476,724 and U.S. Patent Application Publication No. 20070092520.

[0307] Anti-IL6R:

[0308] In another embodiment, the invention provides an isolated anti-IL6R targeting moiety. “Anti-IL6R” means a targeting moiety that specifically binds to an IL-6 receptor. In a preferred embodiment, the anti-IL6R targeting moiety is a scFv. Anti-IL6R can serve as an antagonist to IL-6. The anti-IL6R can be used as a fusion partner to create a conjugate composition that has prophylactic or therapeutic utility when administered to a subject for inflammatory conditions, such as arthritis or Crohn's disease. Tocilizuma has been shown to have clinical utility in moderate to severe rheumatoid arthritis, and has been approved by the FDA. In one embodiment, the anti-IL6R component of a conjugate composition comprises one or more complementarity determining regions (CDRs) of tocilizuma. Antibodies to IL-6R have been described in U.S Pat. Nos. 5,670,373, 5,795,965, 5,817,790, and 7,479,543.

[0309] Anti-IL17:

[0310] In another embodiment, the invention provides an isolated anti-IL17 targeting moiety. “Anti-IL17” means a targeting moiety that specifically binds to the cytokine IL-17. In a preferred embodiment, the anti-IL17 targeting moiety is a scFv. IL-17 is a disulfide-linked homodimeric cytokine of about 32 kDa which is synthesized and secreted only by CD4+activated memory T cells (reviewed in Fossiez et al., Int. Rev. Immunol., 16: 541-551 (1998)). Interleukin (IL-17) is a pro-inflammatory T cell cytokine that is expressed, for example, in the synovial fluid of patients with rheumatoid arthritis. IL-17 is a potent inducer of various cytokines such as TNF and IL-1, and IL-17 has been shown to have additive or even synergistic effects with TNF and IL-1. The anti-IL17 can be used as a fusion partner to create a conjugate composition that has prophylactic or therapeutic utility when administered to a subject for inflammatory conditions, such as arthritis or Crohn's disease, or in multiple sclerosis. LY2439821 is an antibody that has shown utility, when added to oral DMARDs, in improving signs and symptoms of rheumatoid arthritis. In one embodiment, the anti-IL6R component of a targeting moiety comprises one or more complementarity determining regions (CDRs) of LY2439821. Anti-IL17 antibodies have been described in US Patent Application Nos. 20050147609 and 20080269467 and PCT application publication WO 2007/070750.

[0311] IL17R:

[0312] In another embodiment, the invention provides an isolated IL17R targeting moiety. “IL17R” means a targeting moiety that specifically binds to the cytokine receptor for IL-17. In a preferred embodiment, the anti-IL17R targeting moiety is a scFv. Studies have shown that contacting T cells with a soluble form of the IL-17 receptor polypeptide inhibited T cell proliferation and IL-2 production induced by PHA, concanavalin A and anti-TCR monoclonal antibody (Yao et al., J. Immunol., 155:5483-5486 [1995]). As interleukin (IL-17) is a pro-inflammatory T cell cytokine that is a potent inducer of various cytokines such as TNF and IL-1, the IL17R can be used as a fusion partner to create aconjugate composition to bind and neutralize IL-17. The IL17R can have therapeutic utility when administered to a subject for inflammatory conditions, such as rheumatoid arthritis or Crohn's disease. IL7R receptors and homologs have been cloned, as described in U.S. Pat. No. 5,869,286.

[0313] Anti-IL12:

[0314] In another embodiment, the invention provides an isolated anti-IL12 targeting moiety. “Anti-IL12” means a targeting moiety that specifically binds to the cytokine IL-12 and, in some cases, IL-23. In a preferred embodiment, the anti-IL12 targeting moiety is a scFv. Biologically active IL-12 exists as a heterodimer comprised of 2 covalently linked subunits of 35 (p35) and 40 (p40) kD, the latter being known as IL-23. IL-12 is a cytokine that is an important part of the inflammatory response, and stimulates the production of interferon-gamma (IFN-γ) and tumor necrosis factor-alpha (TNF-a) from T and natural killer (NK) cells, and reduces IL-4 mediated suppression of IFN-γ. T cells that produce IL-12 have a coreceptor, CD30, which is associated with IL-12 activity. IL-12 has also been linked with autoimmunity and with psoriasis, with the interaction between T lymphocytes and stem cell keratinocytes that produce IL-12 being of significance. Ustekinumab is an anti-IL12/23 antibody that has demonstrated utility in the treatment of moderate to severe plaque psoriasis, and has been approved by the FDA. The anti-IL-12 can be used as a fusion partner with XTEN to create a fusion protein composition that has therapeutic utility when administered to a subject suffering from inflammatory conditions, such as, but not limited to, psoriasis, rheumatoid arthritis or Crohn's disease. In one embodiment, the anti-IL12 component of a conjugate composition comprises one or more complementarity determining regions (CDRs) of the antibody ustekinumab. Antibodies to IL-12 and their use have been described in U.S. Pat. No. 7,279,157.

[0315] Anti-IL23:

[0316] In another embodiment, the invention provides an isolated anti-IL23 targeting moiety. “Anti-IL23” means a targeting moiety that specifically binds to the cytokine IL-23. In a preferred embodiment, the anti-IL23 targeting moiety is a scFv. IL-23 is the name given to a factor that is composed of the p40 subunit of IL-12, and is a pro-inflammatory cytokine that is an important part of the inflammatory response against infection. IL-23 promotes upregulation of the matrix metalloprotease MMP9, increases angiogenesis and reduces CD8+ T-cell infiltration. IL-23 has been demonstrated to play a role in psoriasis, multiple sclerosis and inflammatory bowel. Ustekinumab is an anti-IL23 antibody that has demonstrated utility in psoriasis. The anti-IL-23 can be used as a fusion partner with XTEN to create a fusion protein composition that has therapeutic utility when administered to a subject suffering from inflammatory conditions, such as, but not limited to, psoriasis, rheumatoid arthritis or Crohn's disease. In one embodiment, the anti-IL23 component of a conjugate composition comprises one or more complementarity determining regions (CDRs) of the antibody ustekinumab. Antibodies to IL-23 have been described in U.S. Pat. Nos. 7,491,391 and 7,247,711.

[0317] CTLA4:

[0318] In another embodiment, the invention provides an isolated CTLA4 targeting moiety. “CTLA4” means a targeting moiety that specifically binds to CD80 and CD86 on antigen-presenting cells, and can specifically bind B7. In a preferred embodiment, the anti-CTLA4 targeting moiety is a scFv. The CTLA4 targeting moiety can be used as a fusion partner to create a conjugate composition that has therapeutic utility when administered to a subject suffering from inflammatory conditions, such as, but not limited to, rheumatoid arthritis, psoriasis and in organ transplantation. Belatacept is a fusion protein composed of the Fc fragment of a human IgG1 immunoglobulin linked to the extracellular domain of CTLA-4 that has shown efficacy in providing extended graft survival. In one embodiment, the CD80 and/or CD86 binding component of a conjugate composition comprises one or more binding domains from belatacept. The cloning and use of CTLA4 compositions have been described in U.S. Pat. Nos. 5,434,131, 5,773,253, 5,851,795, 5,885,579, 7,094,874, and 7,439,230.

[0319] Anti-CD3:

[0320] In another embodiment, the invention provides an isolated anti-CD3 targeting moiety. “Anti-CD3” means a targeting moiety that specifically binds to CD3 T-cell receptor. In a preferred embodiment, the anti-CD3 targeting moiety is a scFv. T-Cell Co-Receptor is a protein complex composed of four distinct chains; a CD3γ chain, a CD3δ chain, and two CD3ε chains. These chains associate with a molecule known as the T cell receptor (TCR) and the -chain to generate an activation signal in T lymphocytes. Anti-CD3 monoclonal antibodies suppress immune responses by transient T-cell depletion and antigenic modulation of the CD3/T-cell receptor complex. For example, anti-CD3 treatment of adult nonobese diabetic (NOD) mice, a spontaneous model of T-cell-mediated autoimmune insulin-dependent diabetes mellitus, can inhibit the autoimmune process leading to diabetes. The use of anti-CD3 antibodies to treat diseases and disorders has been described, for example, in U.S. Pat. No. 4,515,893. In one embodiment, the CD3 binding component of a conjugate composition comprises one or more complementarity determining regions (CDRs) of the antibody Muromonab-CD3.

[0321] Anti-CD40:

[0322] In another embodiment, the invention provides an isolated anti-CD40 targeting moiety. “Anti-CD40” means a targeting moiety that specifically binds to the cell-surface receptor CD-40. In a preferred embodiment, the anti-CD40 targeting moiety is a scFv. CD-40 is a cell-surface receptor that plays a role in immune responses, as well as cell growth and survival signaling when activated by CD40 ligand (CD4OL). CD40 is commonly over-expressed and activated in B-cell malignancies, such as multiple myeloma and lymphoma. The anti-CD40 can be used as a fusion partner to create a conjugate composition that can have therapeutic utility when administered to a subject suffering from various cancers, particularly B-cell malignancies. In one embodiment, the anti-CD40 component of a conjugate composition comprises one or more complementarity determining regions (CDRs) of the antibody lucatumumab. Anti-CD40 antibodies have been described in U.S. Pat. No. 7,445,780, and U.S. Patent Appl. Nos. 20070110754 and 20080254026.

[0323] Anti-TNFalpha:

[0324] In another embodiment, the invention provides an isolated anti-TNFalpha targeting moiety. “Anti-TNFalpha” means a targeting moiety that specifically binds to the cytokine TNFalpha. In a preferred embodiment, the anti-TNFalpha targeting moiety is a scFv. TNFalpha, or cachexin, is a pro-inflammatory cytokine involved in systemic inflammation and is a member of a group of cytokines that stimulate the acute phase reaction. The primary role of TNF is in the regulation of immune cells. TNF is produced mainly by macrophages, but is also produced by lymphoid cells, mast cells, endothelial cells, cardiac myocytes, adipose tissue, fibroblasts, and neuronal tissue. Large amounts of TNF are released in response to lipopolysaccharide and Interleukin-1 (IL-1). TNF has been implicated in autoimmune disorders such as rheumatoid arthritis, ankylosing spondylitis, Crohn's disease, psoriasis and refractory asthma, and plays a role in septic shock and other serious forms of acute inflammatory response and SIRS. The anti-IL-TNFalpha can be used as a fusion partner to create a conjugate composition that can have therapeutic utility in a wide variety of inflammatory disorders, including rheumatoid arthritis, ankylosing spondylitis, Crohn's disease, psoriasis and refractory asthma. Anti-TNFalpha antibodies, such as infliximab and etanercept have shown efficacy in psoriasis, Crohn's disease, ankylosing spondylitis, psoriatic arthritis, rheumatoid arthritis and ulcerative colitis. In one embodiment, the anti-TNFalpha component of a conjugate composition comprises one or more complementarity determining regions (CDRs) or binding regions of the infliximab or etanercept. Anti-TNF antibodies have been described in U.S. Pat. No. 6,790,444, and chimeric antibodies comprising a TNF receptor have been described in U.S. Pat. No. 5,605,690.

[0325] The invention provides targeting moiety compositions in which the binding regions of the foregoing referenced exemplary targeting moieties are sequence variants. For example, it will be appreciated that various amino acid deletions, insertions and substitutions can be made in the targeting moiety to create variants without departing from the spirit of the invention with respect to the binding activity or the pharmacologic properties of the targeting moiety. Examples of conservative substitutions for amino acids in polypeptide sequences are shown in Table 21. However, in embodiments of the targeting moiety in which the sequence identity of the targeting moiety is less than 100% compared to a specific sequence referenced or disclosed herein, the invention contemplates substitution of any of the other 19 natural L-amino acids for a given amino acid residue of the given targeting moiety, which may be at any position within the sequence of the targeting moiety or binding region of the targeting moiety, including adjacent amino acid residues. If any one substitution results in an undesirable change in binding activity, then one of the alternative amino acids can be employed and the construct protein evaluated by the methods described herein (e.g., the assays of the Examples), or using any of the techniques and guidelines for conservative and non-conservative mutations set forth, for instance, in U.S. Pat. No. 5,364,934, the contents of which is incorporated by reference in its entirety, or using methods generally known in the art. In addition, variants can include, for instance, polypeptides wherein one or more amino acid residues are added or deleted at the N- or C-terminus of the referenced or disclosed amino acid sequence of a targeting moiety that retains some if not all of the binding activity of the referenced or disclosed targeting moiety; e.g., the ability to bind a target of Tables 2, 3, 4,18, or 19.

TABLE 21
Exemplary conservative amino acid substitutions

| Original Residue | Exemplary Substitutions |
|---|---|
| Ala (A) | val; leu; ile |
| Arg (R) | Lys; Gln; Asn |
| Asn (N) | Gln; His; Llys; Arg |
| Asp (D) | Glu |
| Cys (C) | Ser |
| Gln (Q) | Asn |
| Glu (E) | Asp |
| Gly (G) | Pro |
| His (H) | Asn; Gln; Lys; Arg |
| Ile (I) | Leu; Val; Met; Ala; Phe; Norleucine |
| Leu (L) | Norleucine; Ile: Val; Met; Ala: Phe |
| Lys (K) | Arg′ Gln; Asn |
| Met (M) | Leu; Phe; Ile |
| Phe (F) | Leu; Val; i = Lle; Ala |
| Pro (P) | Gly |
| Ser (S) | Thr |
| Thr (T) | Ser |
| Trp (W) | Tyr |
| Tyr(Y) | Trp; Phe: Thr; Ser |
| Val (V) | Ile; Leu; Met; Phe; Ala; Norleucine |

[0326] (ii) Exemplary Forms of Targeting Moieties

[0327] The following section provides a non-limiting list and description of exemplary forms of targeting moieties.

[0328] “Antibody” or “antibodies”, as used here, refers to a targeting moiety consisting of one or more polypeptides substantially encoded by immunoglobulin genes or fragments of immunoglobulin genes, and is used in the broadest sense to cover intact monoclonal antibodies, multispecific antibodies (e.g. bispecific antibodies) formed from at least two intact antibodies or fragment thereof, and antibody fragments, scFv, diabodies and other forms of synthetic TM so long as they exhibit the desired biological activity; e.g., binding affinity to a target ligand or antigen.

[0329] Immunoglobulins can be assigned to different classes depending on the amino acid sequence of the constant domain of their heavy chains. There are five major classes of immunoglobulins: IgA, IgD, IgE, IgG, and IgM, and several of these may be further divided into subclasses (isotypes), e.g., IgG1, IgG2, IgG3, IgG4, IgA1, and IgA2. The heavy-chain constant domains that correspond to the different classes of immunoglobulins are called a, 6, c, y, and μ, respectively. The subunit structures and three-dimensional configurations of different classes of immunoglobulins are well known.

[0330] The term “monoclonal” indicates the character of the targeting moiety antibody or antibody fragment as being obtained from a substantially homogeneous population of antibodies or fragments, and is not to be interpreted as requiring production of the antibody by a particular method. For example, while the monoclonal antibodies created in accordance with the methods of the present invention may be made by the hybridoma method first described by Kohler et al., Nature, 256:495 (1975), they may also be synthetics made by recombinant DNA methods (see, e.g., U.S. Pat. No. 4,816,567) and expressed in either mammalian or non-mammalian hosts; e.g., E. coli. The substitution of immortalized cells with bacterial cells considerably simplifies procedures for preparing large amounts of the inventive binding fusion protein molecules. Furthermore, a recombinant production system allows the ability to produce tailor-made antibodies and fragments thereof, or even libraries to screen for specific attributes. For example, it is possible to produce chimeric molecules with new combinations of binding and effector functions, humanized antibodies and novel antigen-binding molecules, including bifunctional binding fusion proteins. Furthermore, the use of polymerase chain reaction (PCR) amplification (Saiki, R. K., et al., Science 239, 487-491 (1988)) to introduce variations into the sequence and isolate antibody producing sequences from cells has great potential for speeding up the timescale under which specificities can be isolated. Amplified V_{H} and V_{L} genes can be cloned directly into vectors for expression in bacteria or mammalian cells (Orlandi, R., et al., 1989, Proc. Natl. Acad. Sci., USA 86, 3833-3837; Ward, E. S., et al., 1989 supra; Larrick, J. W., et al., 1989, Biochem. Biophys. Res. Commun 160, 1250-1255; Sastry, L. et al., 1989, Proc. Natl. Acad. Sci., USA, 86, 5728-5732). Soluble antibody fragments secreted from bacteria can then be screened in binding assays described herein, or others known in the art, to select those constructs with binding activities sufficient to meet the application.

[0331] The monoclonal antibodies herein specifically include “chimeric” antibodies in which a portion of the heavy and/or light chain is identical with or has a high degree of homology to corresponding parental sequences in antibodies derived from a particular first species, while the remainder of the chain(s) is identical with or has a high degree of homology to sequences in antibodies derived from a second species, wherein the resulting antibody exhibits the desired biological activity; e.g., binding affinity for the target antigen or ligand (U.S. Pat. No. 4,816,567; Morrison et al., Proc. Natl. Acad. Sci. USA, 81:6851-4855 (1984)).

[0332] The term “humanized” means forms of antibodies, including fragments, that are chimeric in that they include minimal sequence derived from non-human immunoglobulin but otherwise comprise sequence from human immunoglobulins. Humanization is a method to reduce adverse immune reactions to non-human immunoglobulin drugs and other biologics containing non-human amino acid sequences. Methods for humanizing non-human antibodies have been described in the art. Preferably, a humanized antibody contains one or more amino acid residues from a source which is non-human (e.g., murine, rat, or non-human primate) and that are typically taken from a variable domain of a V_{L} or V_{H} chain having the desired specificity and affinity for the target ligand. Humanization can be essentially performed following the method of Winter and co-workers (Jones et al., Nature, 321:522-525 (1986); Riechmann et al., Nature, 332:323-327 (1988); Verhoeyen et al., Science, 239:1534-1536 (1988)), by substituting non-human hypervariable region sequences for the corresponding sequences of a human antibody (grafting). Accordingly, such “humanized” antibodies are chimeric antibodies (see, e.g., U.S. Pat. No. 4,816,567) wherein all or a portion of the human variable domain has been substituted by the corresponding sequence from a non-human species. In practice, humanized antibodies are typically human antibodies in which some hypervariable CDR residues and possibly some FR residues are substituted by residues from analogous sites in rodent (or other non-human species, e.g., non-human primates) antibodies. In one embodiment, humanized antibodies comprise residues that are not found in the recipient antibody or in the donor antibody to, for example, increase binding affinity or some other property. In general, humanized antibodies comprise substantially all of at least one, and typically two, variable domains, in which all or substantially all of the hypervariable loops (CDRs) correspond to or have sequences derived from those of a non-human immunoglobulin and all or substantially all of the FR regions are those of a human immunoglobulin sequence. In the case of an svFv made from the humaninzed antibody, the variable light and variable heavy chains are typically linked with a linker, which can be a linker of Table 20 or a fragment of an XTEN from Table 10. The humanized antibody can optionally comprise at least a portion of an immunoglobulin constant region (Fc), preferably that of a human immunoglobulin.

[0333] The targeting moieties of the subject compositions can be derived from humanized antibodies. The choice of human variable domains, both light and heavy, to be used in the compositions is very important to reduce immunogenicity of the antibody. For example, the sequence of the variable domain of a rodent antibody can be aligned to a set of known human variable-domain sequences in order to select a human variable domain sequence that is both less likely to elicit an immune response in the recipient and most likely to accept the grafted rodent sequences to form a functional antibody that has inherited the physiochemical properties of the parental rodent antibody. In a corresponding fashion, the human sequence that is closest to that of the rodent can be used as the human framework (FR) for the humanized antibody (Sims et al., J. Immunol, 151:2296 (1993); Chothia et J. Mol. Biol ., 196:901 (1987)). The same framework may be used for several different humanized antibodies (Carter et al., Proc. Natl. Acad. Sci. USA, 89:4285 (1992); Presta et al., J. Immnol., 151:2623 (1993)).

[0334] An additional property is that targeting moieties can be humanized yet retain high affinity for the antigen and other favorable biological properties. To achieve this goal, according to a preferred method, humanized targeting moieties are prepared by an iterative process of analysis of the parental sequences and various conceptual humanized products using three-dimensional models of the parental and humanized sequences followed by testing. Three-dimensional immunoglobulin models are commonly available and are familiar to those skilled in the art. Computer programs are available which illustrate and display probable three-dimensional conformational structures of selected candidate immunoglobulin sequences. Inspection of these displays permits analysis of the likely role of the residues in the functioning of the candidate immunoglobulin sequence, i.e., the analysis of residues that influence the ability of the candidate immunoglobulin to bind its antigen. In this way, FR residues can be selected and combined from the recipient and donor using standard recombinant DNA techniques so that the desired characteristic, such as increased affinity for the target antigen(s), can be achieved. In one embodiment, targeting moiety constructs are created in which a sequence comprising linked heavy chain variable domains is linked to a heavy chain constant domain and a sequence comprising linked light chain variable domains is linked to a light chain constant domain (referred to in this embodiment as a fusion protein). Preferably the constant domains are human heavy chain constant domain and human light chain constant domain respectively. In a further embodiment of the foregoing, the targeting moiety can be designed to include portions or all of an immunoglobulin hinge region in order to permit dimerization of the binding fusion protein, which then can be linked to the N-terminus of the CCD region. In an alternative embodiment, the binding fusion protein can be designed to incorporate a partial Fc without a hinge and with a CH2 domain that is truncated but retains FcRn binding in order to confer longer terminal half-life on the construct. In yet another embodiment, the binding fusion protein can be designed to incorporate a partial Fc without hinge but with a CH2 and CH3 domain, which can dimerize via the CH3 domain. In the embodiments hereinabove described in this paragraph, the remaining polypeptide components of the conjugate composition can be linked to either the N- or C-terminus of the targeting moiety, to enhance one or more properties of the resulting targeted conjugate composition.

[0335] “Antibody fragments” comprise a portion of an intact antibody or a synthetic or chimeric counterpart, preferably the antigen binding or variable region of the intact antibody. Examples of antibody fragments include molecules such as Fab fragments, Fab′ fragments, F(ab′)₂ fragments, Fd fragments, Fabc fragments, Fd fragments, Fabc fragments, domain antibodies (V_{HH}), single-chain antibody molecules (scFv), diabodies, individual antibody light chains, individual antibody heavy chains, chimeric fusions between antibody chains and other molecules, and the like.

[0336] A “Fab fragment” refers to a region of an antibody which binds to antigens. A Fab fragment is composed of a disulfide linked heterodimer of one constant and one variable domain of each of the heavy and the light chain These variable domains shape the paratope—the antigen binding site—at the amino terminal end of each monomer. Fab fragments can be generated in vitro. For example, the enzyme papain can be used to cleave an immunoglobulin monomer into two Fab fragments and an Fc fragment. The enzyme pepsin cleaves below the hinge region, so a F(ab′)₂ fragment and a Fc fragment is formed. As described more fully below, variable regions of the heavy and light chains can be fused together to form a single chain variable fragment (scFv), which retains the original specificity of the parent immunoglobulin.

[0337] The “light chains” of antibodies (immunoglobulins) from any vertebrate species can be assigned to one of two clearly distinct types, called kappa and lambda, based on the amino acid sequences of their constant domains.

[0338] The term “variable” refers to the fact that portions of the variable domains differ extensively in sequence among antibodies and confer the binding specificity of each particular antibody for its particular antigen. The variability is concentrated in three segments called complementarity-determining regions (CDRs) or hypervariable regions, both in the light-chain and the heavy-chain variable domains; i.e., LCDR1, LCDR2 and LCDR3, HCDR1, HCDR2 and HCDR3. In particular, the CDR regions from antibodies can be incorporated into targeting moieties of the subject compositions, but can be also be individually selected from one or more antibodies to create the binding domain. The more highly conserved portions of variable domains are called the framework regions (FR), which when combined with CDR sequences, may also be incorporated into targeting moieties. The variable domains of native heavy and light chains each comprise four FR regions, typically adopting a β-sheet configuration, connected by three CDRs that form loops. The CDRs in each chain are held together in close proximity by the FR regions and, with the CDRs from the other chain, contribute to the formation of the antigen-binding site of antibodies (see Kabat et al., NIH Publ. No. 91-3242, Vol. I, pages 647-669 (1991)). The constant domains are not involved directly in binding an antibody to an antigen, but exhibit or participate in various effector functions, such as antibody-dependent cellular toxicity.

[0339] Single-chain Variable Fragment Targeting Moieties

[0340] In one aspect, the present invention provides single-chain variable fragment binding fusion protein compositions. The term “single-chain variable fragment” or “scFv” means an antibody fragment that comprises one V_{H} and one V_{L} domain of an antibody, wherein these domains are present in a single polypeptide chain, and are generally joined by a polypeptide linker between the domains that enables the scFv to form the desired structure for antigen binding. Methods for making scFv's are known in the art (see, e.g., U.S. Pat. No. 6,806,079; Bird et al. (1988) Science 242:423-426; Huston et al. (1988) PNAS 85:5879-5883; Pluckthun in The Pharmacology of Monoclonal Antibodies, vol. 113, Rosenburg and Moore eds. Springer-Verlag, New York, pp. 269-315 (1994)). Two scFv can be combined in tandem in a single polypeptide to form a scFv-scFv fusion which can confer increased valency or specificity. Alternatively, two scFv can be joined non-covalently to form a diabody.

[0341] A binding domain of the scFv binding fusion protein compositions of the invention can have the N- to C-terminus configuration VH-linker-VL or VL-linker-VH. In one embodiment, the targeting moiety would then be fused to the CCD, PCM, and XTEN and optionally a second XTEN and PCM sequence linked to the N- or C-terminus of the resulting fusion protein, having at least the following structure permutations (N- to C-terminus); XTEN-PCM-CCD-VH-linker-VL; VH-linker-VL-CCD-PCM-XTEN; XTEN-PCM-CCD-VH-linker-VL-PCM-XTEN; XTEN-PCM-CCD-VL-linker-VH; VL-linker-VH-CCD-PCM-XTEN; XTEN-PCM-CCD-VL-linker-VH-CCD-PCM-XTEN. In another embodiment, two identical or distinct scFv in any format above can be joined. In another embodiment, the scFv would be conjugated to an XTEN, either at the N-terminus of the XTEN or to one or more cyteine or lysine residues of the XTEN. In the foregoing embodiment of the fusion proteins, the long carrier XTEN can comprise a sequence that can be a fragment of or that exhibits at least about 80% sequence identity, or 81%, 82%, 83%, 84%, 85%, 86%, 87%, 88%, 89%, 90%, 91%, 92%, 93%, 94%, 95%, 96%, 97%, 98%, 99%, or 100% sequence identity to a sequence selected from any one of Tables 10. In the foregoing embodiments of the scFv, the invention contemplates and encompasses compositions in which the VL and VH chains from the named antibodies, whether described in a narrative fashion or listed in the various tables, including Table 19, are incorporated into scFv linked by an appropriate linker, such as the sequence GSGEGSEGEGGGEGSEGEGSGEGGEGEGSG (SEQ ID NO: 590), or a sequence of Table 20 wherein the scFv can serve as a component to be either recombinantly fused to the CCD-PCM-XTEN fusion protein or PCM or is chemically conjugated as a component of a conjugate composition. In one embodiment, the invention provides a scFv TM for a conjugate composition in which the TM is derived from a monoclonal antibody of Table 19, wherein the corresponding VL and VL sequences have at least about 80% sequence identity, or 81%, 82%, 83%, 84%, 85%, 86%, 87%, 88%, 89%, 90%, 91%, 92%, 93%, 94%, 95%, 96%, 97%, 98%, 99%, or 100% sequence identity to the VL and VH sequences of such monoclonal antibody. In another embodiment, the invention provides a scFv TM for an targeted conjugate composition in which the TM is derived from the VH and VL sequences listed for a monoclonal antibody of Table 19, wherein the VL and VL sequences of the TM have at least about 80% sequence identity, or 81%, 82%, 83%, 84%, 85%, 86%, 87%, 88%, 89%, 90%, 91%, 92%, 93%, 94%, 95%, 96%, 97%, 98%, 99%, or 100% sequence identity to the VL and VH sequences of such monoclonal antibody and the VL and VH sequences would be linked by a linker sequence of Table 20 or a linker known in the art for svFv compositions, to result in the scFv.

[0342] The invention also encompasses scFv targeting moieties constructed using fewer than the six CDRs found in a conventional antibody or scFv. In one embodiment, the scFv comprises five, four, or three CDR regions amongst the possible permutations of LCDR1, LCDR2 and LCDR3, HCDR1, and HCDR2 and HCDR3, intersperced with appropriate linkers, described below. Representative configurations of such scFv permutations are shown in FIG. 43. In one embodiment, the invention provides a scFv TM for an targeted conjugate composition in which the TM is derived from a monoclonal antibody of Table 19, wherein the corresponding LCDR1, LCDR2 and LCDR3, HCDR1, and HCDR2 and HCDR3 sequences have at least about 80% sequence identity, or 81%, 82%, 83%, 84%, 85%, 86%, 87%, 88%, 89%, 90%, 91%, 92%, 93%, 94%, 95%, 96%, 97%, 98%, 99%, or 100% sequence identity to the LCDR1, LCDR2 and LCDR3, HCDR1, and HCDR2 and HCDR3 sequences of such monoclonal antibody. In another embodiment, the invention provides a scFv TM for an targeted conjugate composition in which the TM is derived from the LCDR1, LCDR2 and LCDR3, HCDR1, and HCDR2 and HCDR3 sequences of the VH and VL sequences listed for a monoclonal antibody of Table 19, wherein the LCDR1, LCDR2 and LCDR3, HCDR1, and HCDR2 and HCDR3 sequences of the TM have at least about 80% sequence identity, or 81%, 82%, 83%, 84%, 85%, 86%, 87%, 88%, 89%, 90%, 91%, 92%, 93%, 94%, 95%, 96%, 97%, 98%, 99%, or 100% sequence identity to the LCDR1, LCDR2 and LCDR3, HCDR1, and HCDR2 and HCDR3 sequences of such monoclonal antibody.

[0343] The linkers utilized to join the components of the targeting moieties are preferably flexible in nature. In one embodiment the linker joining the V_{L} and V_{H} binding domains that form the antigen binding site of the scFv targeting moiety can have from about 1 to about 30 amino acid residues in length. In another embodiment, the linker can have from about 30 to about 200 amino acid residues, or about 40 to about 144 amino acid residues, or about 50 to about 96 amino acid residues. In any of the embodiments hereinabove described in connection with targeting moieties, the linker can be a sequence derived from an XTEN sequence or a linker sequence of Table 20. In another embodiment, the linker can be a sequence in which at least 80% of the residues are comprised of amino acids glycine, serine, and/or glutamate, such as, but not limited to a sequence with about 80-100% sequence identify to the sequence GSGEGSEGEGGGEGSEGEGSGEGGEGEGSG (SEQ ID NO: 590), or a portion or a multimer thereof.

[0344] In one embodiment, the invention provides conjugate compositions comprising two or more scFv targeting moieties. In one embodiment, the two or more scFv targeting moieties may be identical. In another embodiment, the two or more scFv targeting moieties may be different and may bind to different targets (e.g., two or more targets of Tables 18-19) or to different epitopes on the same target. In the foregoing embodiments, the two or more scFv targeting moieties can be joined by a linker sequence, which can include a fragment of an XTEN sequence or a linker sequence of Table 20.

[0345] 2. Proteins, Hormones and Organic Molecules as Targeting Moieties

[0346] In another aspect, the invention provides targeted conjugate compositions comprising XTEN covalently linked to non-antibody molecules that serves as a targeting moiety, which may be proteins, peptides, hormones, non-proteinaceous molecules, or organic molecules with specific binding affinity to a ligand from a target tissue or cell. In one embodiment, the non-antibody targeting moiety is a ligand to a cell surface receptor expressed on a cancer cell. In another embodiment, the non-antibody targeting moiety is a ligand to a cell surface receptor expressed on an inflammatory cell. In another embodiment, the non-antibody targeting moiety is a ligand to a luteinizing hormone-releasing hormone receptor expressed on a cancer cell. In another embodiment, the targeting moiety is one or more molecules of luteinizing hormone-releasing hormone, which targets a cancer cell. In another embodiment, the non-antibody targeting moiety is a ligand to a folate receptor expressed on a cancer cell. In another embodiment, the targeting moiety of the targeted conjugate composition is one or more molecules of folate, which targets a cancer cell. In another embodiment, the targeting moiety of the targeted conjugate compositions is one or more molecules of CTLA4. In another embodiment, the targeting moiety of the targeted conjugate compositions is one or more molecules of asparaginylglycylarginine (NGR) or an analog thereof. In another embodiment, the targeting moiety of the targeted conjugate compositions is one or more molecules of arginylglycylaspartic acid (RGD) or an analog thereof.

[0347] “Luteinizing hormone-releasing hormone” or “LHRH” means the human protein (UniProt No. P01148) encoded by the GNRH1 gene that is processed in the preoptic anterior hypothalamus from a 92-amino acid preprohormone into the linear decapeptide end-product having the sequence pyroGlu-His-Trp-Ser-Tyr-Gly-Leu-Arg-Pro-Gly-NH2 (SEQ ID NO: 600), as well as species and synthetic variations thereof, having at least a portion of the biological activity of the native peptide. LHRH plays a pivotal role in the regulation of the pituitary/gonadal axis, and thus reproduction. LHRH exerts its effects through binding to high-affinity receptors on the pituitary gonadotroph cells and subsequent release of FSH and LH. LHRH is found in organs outside of the hypothalamus and pituitary, and because a high percentage of certain cancer tissues have LHRH binding sites and because sex steroids have been implicated in the development of breast and prostate cancers, hormonal therapy with LHRH agonists are approved or are considered for the treatment of sex-steroid-dependent conditions such as estrogen-dependent breast cancer, ovarian cancer, endometrial cancer, bladder cancer and androgen-dependent prostate carcinoma. Because the half-life is reported to be less than 4 minutes. (Redding TW, et al. The Half-life, Metabolism and Excretion of Tritiated Luteinizing Hormone-Releasing Hormone (LH-RH) in Man. J Clin Endocrinol, Metab. (1973) 37:626-631). Accordingly, the invention contemplates use of LHRH as a selective targeting moiety in targeted conjugate compositions useful in treating cancers, described above.

[0348] In particular embodiments, the invention provides targeted conjugate compositions comprising one or more LHRH targeting components selected from Table 22 and one or more drug components selected from Tables 14-17. In the foregoing embodiment, the LHRH can be linked to a first XTEN that, in turn, is linked to one or more XTEN to which the drug components are conjugated, using the various configuration embodiments described herein. Alternatively, the LHRH and drug components can be conjugated to a monomeric XTEN.

TABLE 22
Exemplary LHRH
Composition

pGlu-HWSYGLRPG-NH2 (SEQ ID NO: 600)
pGlu-HWSY[D-Lys]LRPG-NH2
pGlu-HWSY[D-Trp]LRPG-NH2
pGlu-HWSY[D-Leu]LRP-NHEt
pGlu-HWSY[D-Ser(tBu)]LRP-NHEt
pGlu-HWSY[D-2-Nal]LRPG-NH2
pGlu-HWSY[D-His(Bzl)]LRP-NHEt
pGlu-HWSY[D-Ser(tBu)]LRP-Azagly-NH2
pGlu-HWSY[D-Trp]LRP-NHEt
pGlu-HWSHDWLPG-NH2 (SEQ ID NO: 601)

[0349] “Folate” and “folic acid” are used interchangeably herein to mean the chemical also known as pteroyl-L-glutamic acid, vitamin B9, folacin. and (2S)-2-[(4-{[(2-amino-4-hydroxypteridin-6-yl)methyl]amino}phenyl)formamido]pentanedioic acid. Folate is a ligand for the cell receptor known as folate receptor. Folate receptor alpha is a protein that in humans is encoded by the FOLR1 gene (Campbell IG, et al. (1991). Folate-binding protein is a marker for ovarian cancer (Cancer Res 51 (19): 5329-5338). Many cancer cells have a high requirement for folic acid and overexpress the folate receptor. The folate receptor encoded by this gene is a member of the folate receptor (FOLR) family, and members have a high affinity for folic acid and for several reduced folic acid derivatives, and mediate delivery of 5-methyltetrahydrofolate to the interior of cells. Folate receptor can be overexpressed by a number of tumors including ovarian, breast, renal, lung, colorectal, and brain. Accordingly, the invention contemplates use of folate as a selective targeting moiety in targeted conjugate compositions useful in treating cancers, described above.

[0350] “Arginylglycylaspartic acid” or “RGD” are used interchangeably herein to mean a tripeptide composed of L-arginine, glycine, and L-aspartic acid. RGD is a tripeptide sequence common in cellular recognition, and are ligands of integrins. RGD containing peptides can act as inhibitors of integrin-ligand interactions and induce apoptosis RGD peptides can interact with the tumor marker integrin alphaVbeta3, which is known to control angiogenesis, cell proliferation, and cell migration (Mol. Pharmaceutics (2012) 9:2961-2973). Integrin alphaVbeta3, a vitronectin receptor, has been implicated in several malignant tumors, including melanoma, glioma, ovarian, prostate, and breast cancer. Additionally, nearly all breast cancer tumors with a bone metastasis have high expression of integrin alphaVbeta3. Accordingly, the invention contemplates use of RGD as a selective targeting moiety in targeted conjugates conjugates useful in treating cancers. Exemplary RGD analogs useful as targeting moieties in the targeted conjugate compositions include RGDc, cRGC, cyclic(RGDyK), cyclic(RGDfK), cyclic(RGDfC), cyclic(RGDRf(N-Me)v), and cyclic(CGisoDGRG) (SEQ ID NO: 602). The invention also contemplates compositions in which the foregoing RGD analogs are incorporated in short XTEN fragments as targeting moieties.

[0351] “Asparaginylglycylarginine” or “NGR” are used interchangeably herein to mean a tripeptide of asparagine, glycine, and arginine NGR is a tripeptide sequence selected by phage display that specifically targets tumor vasculature by recognizing aminopeptidase N (APN or CD13) receptor on the cell membrane of tumor cells. Upon binding to APN, NGR peptides are internalized into cells via the endosomal pathway. Though APN is not exclusively expressed in tumor neovasculature, NGR peptides specifically target APN expressed in tumor blood vessels rather than other APN-expressing tissue (Cancer Res. (2002) 62:867-874). Increased APN expression has been noted for several malignant tumors, including breast, colon, non-small-cell lung, and pancreatic cancer (Cancer Sci. (2011) 102:501-508). Additionally, many cases of high APN tumor expression are correlated with poor survival. Accordingly, the invention contemplates use of NOR as a selective targeting moiety in targeted conjugates conjugates useful in treating cancers. Exemplary NOR analogs useful as targeting moieties in the targeted conjugate compositions include NGR, GNGRG (SEQ ID NO: 603), cyclic(NGR), cyclic(kNGRE), and CNGRC (cyclic disulfide) (SEQ ID NO: 604). The invention also contemplates compositions in which the foregoing NGR analogs are incorporated in short XTEN fragments as targeting moieties.

### VI). XTEN-Cross-Linker and Methods of Making Such Compositions

[0352] The present invention relates in part to highly purified preparations of XTEN-cross-linker conjugate compositions useful as conjugation partners to which payloads are conjugated, as described herein. The invention also relates to highly purified preparations of payloads linked to one or more XTEN using the XTEN-cross-linker conjugation partners. The present invention encompasses compositions and methods of making the targeted conjugate compositions formed by linking of any of the herein described XTEN with a payload, as well as reactive compositions and methods of making the compositions formed by conjugating XTEN with a cross-linker or other chemical methods described herein. It is specifically intended that the terms “CCD-conjugate”, “CCD-cross-linker”, “XTEN-conjugate” and “XTEN-cross-linker” encompass the linked reaction products remaining after the conjugation of the reactant conjugation partners, including the reaction products of cross-linkers, click-chemistry reactants, or other methods described herein.

[0353] In some embodiments, the CCD and XTEN utilized to create the subject conjugates comprise one or more CCD or XTEN selected from any one of the sequences in Table5, Table 10, or Table 11, which may be linked to the payload component directly or via cross-linkers disclosed herein. In one embodiment, the CCD utilized to create the targeted conjugate compositions comprise a CCD having at least 90%, 91%, 92%, 93%, 94%, 95%, 96%, 97%, 98%, 99%, or 100% sequence identity compared to a CCD sequence selected from Table 5. In other embodiments, the one or more XTEN utilized to create the subject conjugates individually comprise an XTEN sequence having at least about 80% sequence identity, or alternatively 90%, 91%, 92%, 93%, 94%, 95%, 96%, 97%, 98%, 99%, or 100% sequence identity compared to an XTEN selected from Table 10 or Table 11 or a fragment thereof, when optimally aligned with a sequence of comparable length. In one embodiment, the subject conjugates are multimeric in that they comprise a first and a second XTEN sequence, wherein the XTEN are the same or they are different and wherein each individually comprises an XTEN sequence having at least about 90% sequence identity, or alternatively 91%, 92%, 93%, 94%, 95%, 96%, 97%, 98%, 99%, or 100% sequence identity compared to an XTEN selected from Table 10 or Table 11 or a fragment thereof, when optimally aligned with a sequence of comparable length. In another embodiment, the subject conjugates are multimeric in that they comprise a first, a second, or a third XTEN sequences, wherein the XTEN are the same or they are different and wherein each individually comprises an XTEN sequence having at least about 90% sequence identity, or alternatively 91%, 92%, 93%, 94%, 95%, 96%, 97%, 98%, 99%, or 100% sequence identity compared to an XTEN selected from Table 10 or Table 11 or a fragment thereof, when optimally aligned with a sequence of comparable length. In yet another embodiment, the subject conjugates are multimeric in that they comprise 3, 4, 5, 6 or more XTEN sequences, wherein the XTEN are the same or they are different and wherein each individually comprises an XTEN sequence having at least about 80% sequence identity, or alternatively 81%, 82%, 83%, 84%, 85%, 86%, 87%, 88%, 89%, 90%, 91%, 92%, 93%, 94%, 95%, 96%, 97%, 98%, 99%, or 100% sequence identity compared to an XTEN selected from Table 10 or Table 11 or a fragment thereof. In the multimeric conjugates, the cumulative length of the residues in the XTEN sequences is greater than about 100 to about 3000, or about 400 to about 1000 amino acid residues, and the XTEN can be identical or they can be different in sequence or in length. As used herein, cumulative length is intended to encompass the total length, in amino acid residues, when more than one XTEN is incorporated into the conjugate.

[0354] The present invention encompasses compositions and methods of making CCD and/or XTEN covalently linked to a small molecule payload drugs, resulting in a conjugate, as well as compositions of CCD or XTEN covalently linked to a payload biologically active proteins (which encompasses peptides or polypeptides), that, along with the other components (e.g., targeting moiety and PCM) result in a targete conjugate composition. In another aspect, the invention provides compositions of one or more CCD or XTEN linked to payloads of one or more drugs, one or more targeting moieties, and one or more peptidyl cleavage moities (PCM) resulting in the targeted conjugate compositions of the instant invention. In particular, the invention provides such targeted conjugate compositions useful in the treatment of a disease or condition for which the administration of a payload drug and/or protein that is useful in the treatment, amelioration or prevention of a disease or condition in a subject. The targeted conjugate compositions of some embodiments generally comprise one or more of the following components: 1) XTEN; 2) CCD; 3) cross-linker; 4) payload, 5) targeting moiety, and, optionally, 5) PCM to which the components are recombinantly fused or chemically conjugated; either directly or by use of a cross-linker, such as commercially-available cross-linkers described herein, or by use of click-chemistry reactants, or in some cases, may be created by conjugation between reactive groups in the CCD or XTEN and payload without the use of a linker as described herein. However, in some cases of foregoing types of compositions, the composition can be created without the use of a cross-linker provided the components are otherwise chemically reactive.

[0355] The conjugation of CCD or XTEN to payloads and targeting moieties confers several advantages on the resulting compositions compared to the payloads not linked to CCD or XTEN. As described more fully below, non-limiting examples of the enhanced properties include increases in the overall solubility and metabolic stability, reduced susceptibility to proteolysis in circulation, reduced immunogenicity, reduced rate of absorption when administered subcutaneously or intramuscularly, reduced clearance by the kidney, enhanced interactions with the target tissues by virtue of the targeting moiety with concommitant reduced toxicity, targeted delivery of payload, reduced toxicity of the payload component by virtue of the shielding effect of XTEN until released by cleavage of the PCM, and enhanced pharmacokinetic properties. In particular, it is specifically contemplated that the subject compositions, in accordance with some embodiments, are designed such that they have an enhanced therapeutic index and reduced toxicity or side effects, achieved by a combination of the shielding effect and steric hindrence of XTEN together with targeted delivery (achieved by inclusion of a targeting moiety in the composition) and release of the payload (achieved by inclusion of a peptidyl cleave moiety in the composition) in proximity to or within a target tissue that produces a protease for with the peptidyl cleave moiety is a substrate. In addition, it is contemplated that the compositions will, by their design and linkage to XTEN, have enhanced pharmacokinetic properties compared to the corresponding payload(s) not linked to XTEN, e.g., a terminal half-life increased by at least about 2-fold, 3-fold, 4-fold, 5-fold, 6-fold, 7-fold, 8-fold, 9-fold, 10-fold, 20-fold, 30-fold, 40-fold, or 100-fold greater, increased area under the curve (AUC) (e.g., 25%, 50%, 100%, 200%, 300% or more), lower volume of distribution, slower absorption after subcutaneous or intramuscular injection (an advantage compared to commercially-available forms of payload that must be administered by a similar route) such that the Cmax is lower, which, in turn, results in reductions in adverse effects of the payload that, collectively, results in an increased period of time that a conjugation composition administered to a subject provides therapeutic activity. In some embodiments, the conjugation compositions comprise cleavage sequences (described more fully, above) that permits sustained release of active payload such that the administered targeted conjugate composition acts as a depot when subcutaneously or intramuscularly administered, even after entering the blood circulatory system. It is specifically contemplated that targeted conjugate compositions can exhibit one or more or any combination of the improved properties disclosed herein. As a result of these enhanced properties, the targeted conjugate compositions permit less frequent dosing, more tailored dosing, and/or reduced toxicity compared to payload not linked to the targeted conjugate composition and administered in a comparable fashion. Such targeted conjugate compositions have utility to treat certain conditions known in the art to be affected, ameliorated, or prevented by administration of the payload to a subject in need thereof, as described herein.

[0356] 1. Cross-Linker Reactants for Conjugation

[0357] In another aspect, the invention relates to CCD or XTEN conjugated to cross-linkers, resulting in CCD-cross-linker and XTEN-cross-linker conjugates that can be utilized to prepare targeted conjugate compositions. In particular, the herein-described CCD-cross-linker and XTEN-cross-linker conjugate partners are useful for conjugation to payload agents bearing at least one thiol, amino, aminooxy, carboxyl, aldehyde, alcohol, azide, alkyne or any other reactive group available and suitable, as known in the art, for reaction between the components described herein.

[0358] In another aspect, the invention relates to payloads conjugated to cross-linkers, resulting in payload-cross-linker conjugates that can be utilized to prepare targeted conjugate compositions. In particular, the herein-described payload-cross linker partners are useful for conjugation to CCD or XTEN bearing at least one thiol, amino, aminooxy, carboxyl, aldehyde, alcohol, azide, alkyne or any other reactive group available and suitable, as known in the art, for reaction between the components described herein.

[0359] Exemplary embodiments of CCD and XTEN have been described above, including preparations of substantially homogeneous XTEN. The invention provides CCD and XTEN that further serve as a platform to which payloads can be conjugated, such that they serve as a “carrier”, conferring certain desirable pharmacokinetic, chemical and pharmaceutical properties to the compositions, amongst other properties described below. In other embodiments, the invention provides polynucleotides that encode CCD or XTEN that can be linked to genes encoding peptide or polypeptide payloads that can be incorporated into expression vectors and incorporated into suitable hosts for the expression and recovery of the subject recombinant fusion proteins.

[0360] In some embodiments, the CCD or XTEN components as described herein, above, are engineered to incorporate a defined number of reactive amino acid residues that can be reacted with cross-linking agents or can further contain reactive groups that can be used to conjugate to payloads. In one embodiment, the invention provides CCD comprising one or more a cysteine residues wherein the cysteine, each of which contains a reactive thiol group, are conjugated to a cross-linker, resulting in a CCD-cross-linker conjugate or to thiol-reactive payload, resulting in CCD-payload conjugate. In another embodiment, the invention provides a cysteine-engineered XTEN, such as the sequences of Table 11, wherein the cysteine, each of which contains a reactive thiol group, are conjugated to a cross-linker, resulting in an XTEN-cross-linker conjugate or to thiol-reactive payload, resulting in a XTEN-payload conjugate. In another embodiment, invention provides XTEN with α-amino group or lysine-engineered XTEN wherein lysine, each of which contains a positively charged hydrophilic ε-amino group, are conjugated to a cross-linker, resulting in an XTEN-cross-linker conjugate or to amine-reactive payload, resulting in an XTEN-payload conjugate. In the embodiments of cysteine-engineered XTEN, each comprises about 1 to about 100 cysteine amino acids, or from 1 to about 50 cysteine amino acids, or from 1 to about 40 cysteine amino acids, or from 1 to about 20 cysteine amino acids, or from 1 to about 10 cysteine amino acids, or from 1 to about 5 cysteine amino acids, or 9 cysteines, or 3 cysteines, or a single cysteine amino acid that is available for conjugation. In the embodiments of lysine-engineered XTEN, each comprises about 1 to about 100 lysine amino acids, or from 1 to about 50 lysine amino acids, or from 1 to about 40 lysine engineered amino acids, or from 1 to about 20 lysine engineered amino acids, or from 1 to about 10 lysine engineered amino acids, or from 1 to about 5 lysine engineered amino acids, or a single lysine that is available for conjugation. In another embodiment, the engineered XTEN comprises both cysteine and lysine residues of the foregoing ranges or numbers. In another embodiment, the invention provides CCD wherein each comprises about 1 to about 10 cysteine amino acids, or from 1 to about 10 cysteine amino acids, or from 1 to about 3 cysteine amino acids. In one embodiment, the invention provides CCD wherein the incorporated cysteine, each of which contains a reactive thiol group, are conjugated to a cross-linker, resulting in an CCD-cross-linker conjugate.

[0361] Generally, cysteine thiol groups are more reactive (specifically, more nucleophilic) towards electrophilic conjugation reagents than amine or hydroxyl groups. In addition, cysteine residues are generally found in smaller numbers in a given protein; thus are less likely to result in multiple conjugations within the same protein. Cysteine residues have been introduced into proteins by genetic engineering techniques to form covalent attachments to ligands or to form new intramolecular disulfide bonds (Better et al (1994) J. Biol. Chem. 13:9644-9650; Bernhard et al (1994) Bioconjugate Chem. 5:126-132; Greenwood et al (1994) Therapeutic Immunology 1:247-255; Tu et al (1999) Proc. Natl. Acad. Sci USA 96:4862-4867; Kanno et al (2000) J. of Biotechnology, 76:207-214; Chmura et al (2001) Proc. Nat. Acad. Sci. USA 98(15):8480-8484; U.S. Pat. No. 6,248,564).

[0362] In one embodiment, the invention provides an isolated composition comprising a cysteine-engineered XTEN or CCD conjugated to a cross-linker, wherein the cross-linker is selected from sulfhydryl-reactive homobifunctional or heterobifunctional cross-linkers. In another embodiment, the invention provides an isolated composition comprising a lysine-engineered XTEN conjugated by a cross-linker, wherein the cross-linker is selected from amine-reactive homobifunctional or heterobifunctional cross-linkers. Cross-linking generally refers to a process of chemically linking two or more molecules by a covalent bond. The process is also called conjugation or bioconjugation with reference to its use with proteins and other biomolecules. For example, proteins can be modified to alter N- and C-termini, and amino acid side chains on proteins and peptides in order to block or expose reactive binding sites, inactivate functions, or change functional groups to create new targets for cross-linking

[0363] In one aspect, the invention provides methods for the site-specific conjugation to XTEN polymer, accomplished using chemically-active amino acid residues or their derivatives (e.g., the N-terminal α-amine group, the ε-amine group of lysine, the thiol group of cysteine, the C-terminal carboxyl group, carboxyl groups of glutamic acid and aspartic acid). Functional groups suitable for reactions with primary α- and ε-amino groups are chlorocyanurates, dichlorotreazines, trezylates, benzotriazole carbonates, p-nitrophenyl carbonates, trichlorophenyl carbonates, aldehydes, mixed anhydrides, carbonylimidazoles, imidoesters, tetrafluorophenyl (TFP) and pentafluorophenyl (PFP) esters, N-hydroxysuccinimide esters, N-hydroxysulfosuccinimide esters (Harris, J. M., Herati, R. S. Polym. Prepr. (Am. Chem. Soc., Div. Polym. Chem), 32(1), 154-155 (1991); Herman, S., et al. Macromol. Chem. Phys. 195, 203-209 (1994); Roberts, M. J. et. al. Advanced Drug Delivery Reviews, 54, 459-476 (2002)). N-hydroxysuccinimide esters (NHS-esters and their water soluble analogs sulfo-NHS-esters) are commonly used for protein conjugation (see FIG. 2). NHS-esters yield stable amide products upon reaction with primary amines with relatively efficient coupling at physiological pH. The conjugation reactions are typically performed in 50-200 mM phosphate, bicarbonate/carbonate, HEPES or borate buffers (pH between 7 and 9) at 4° C. to room temperature from 0.5 to 2 hrs. NHS-esters are usually used at two- to 50-fold molar excess to protein. Typically, the concentration of the reagent can vary from 0.1-10 mM, while the optimal protein concentration is 50-100 μM.

[0364] In another method, given that XTEN polypeptides possess only a single N-terminal α-amino group, the XTEN can be engineered to contain additional α-amino group(s) of intentionally incorporated lysine residues; exemplary sequences of which are provided in Table 11. The α-and ε-amino groups have different pKa values: approximately 7.6 to 8.0 for the α-amino group of the N-terminal amino acid, and approximately 10-10.5 for the ε-amino group of lysine. Such a significant difference in pKa values can be used for selective modification of amino groups. Deprotonation of all primary amines occurs at pH above pH 8.0. In this environment, the nucleophilic properties of different amines determine their reactivity. When deprotonated, the more nucleophilic ε-amino groups of lysines are generally more reactive toward electrophiles than α-amino groups. On the other hand, at a lower pH (for example pH 6), the more acidic α-amino groups are generally more deprotonated than ε-amino groups, and the order of reactivity is inverted. For example, the FDA-approved drug Neulasta (pegfilgranstim) is granulocyte colony-stimulating factor (G-CSF) modified by covalent attachment of 20 kDa PEG-aldehyde. Specific modification of the protein's N-terminal amino acid was accomplished by exploiting the lower pKa of α-amino group as compared to ε-amino groups of internal lysines (Molineaux, G. Curr. Pharm. Des. 10, 1235-1244 (2004), U.S. Pat. No. 5,824,784).

[0365] The CCD and XTEN polypeptides comprising cysteine residues can be genetically engineered using recombinant methods described herein (see, e.g., Examples) or by standard methods known in the art. Conjugation to thiol groups can be carried using highly specific reactions, leading to the formation of single conjugate species joined by cross-linking agents. Functional groups suitable for reactions with cysteine thiol-groups are N-maleimides, haloacetyls, and pyridyl disulfides. The maleimide group reacts specifically with sulfhydryl groups when the pH of the reaction mixture is between pH 6.5 and 7.5, forming a stable thioether linkage that is not reversible (see FIG. 3). At neutral pH, maleimides react with sulfhydryls 1,000-fold faster than with amines, but when the pH is raised to greater than 8.5, the reaction favors primary amines Maleimides do not react with tyrosines, histidines or methionines. For reaction solutions, thiols must be excluded from reaction buffers used with maleimides as they will compete for coupling sites. Excess maleimides in the reaction can be quenched at the end of a reaction by adding free thiols, while EDTA can be included in the coupling buffer to minimize oxidation of sulfhydryls.

[0366] In another embodiment, the invention contemplates use of haloacetyl reagents that are useful for cross-linking sulfhydryls groups of CCD or XTEN or payloads to prepare the subject conjugates. The most commonly used haloacetyl reagents contain an iodoacetyl group that reacts with sulfhydryl groups at physiological pH. The reaction of the iodoacetyl group with a sulfhydryl proceeds by nucleophilic substitution of iodine with a thiol producing a stable thioether linkage (see FIG. 4). Using a slight excess of the iodoacetyl group over the number of sulfhydryl groups at pH 8.3 ensures sulfhydryl selectivity. If a large excess of iodoacetyl group is used, the iodoacetyl group can react with other amino acids. Imidazoles can react with iodoacetyl groups at pH 6.9-7.0, but the incubation must typically proceed for longer than one week. Histidyl side chains and amino groups react in the unprotonated form with iodoacetyl groups above pH 5 and pH 7, respectively. In another embodiment, cross-linkers useful for sulfhydryls groups are pyridyl disulfides. Pyridyl disulfides react with sulfhydryl groups over a broad pH range (the optimal pH is 4-5) to form disulfide bonds linking CCD or XTEN to payloads (see FIG. 5). As a disulfide, conjugates prepared using these reagents are cleavable. During the reaction, a disulfide exchange occurs between the molecule's —SH group and the 2-pyridyldithiol group. As a result, pyridine-2-thione is released. These reagents can be used as crosslinkers and to introduce sulfhydryl groups into proteins. The disulfide exchange can be performed at physiological pH, although the reaction rate is slower.

[0367] The targeted conjugate compositions comprising active synthetic peptides or polypeptides can be prepared using chemically active amino acid residues or their derivatives; e.g., the N-terminal α-amino group, the ε-amino group of lysine, a thiol group of cysteine, the carboxyl group of the C-terminal amino acid, a carboxyl group of aspartic acid or glutamic acid. Each peptide contains N-terminal α-amino group regardless of a primary amino acid sequence. If necessary, N-terminal α-amino group can be left protected/blocked upon chemical synthesis of the active peptide/polypeptide. The synthetic peptide/polypeptide may contain additional ε-amino group(s) of lysine that can be either natural or specifically substituted for conjugation.

[0368] Since cysteines are generally less abundant in natural peptide and protein sequences than lysines, the use of cysteines as a site for conjugation reduces the likelihood of multiple conjugations to XTEN-cross-linker molecules in a reaction. It also reduces the likelihood of peptide/protein deactivation upon conjugation. Moreoever, conjugation to cysteine sites can often be carried out in a well-defined manner, leading to the formation of single species polypeptide conjugates. In some cases cysteine may be absent in the amino acid sequence of the peptide to be conjugated. In such a case, cysteine residue can be added to the N- or C-terminus of the peptide either recombinantly or synthetically using standard methods. Alternatively, a selected amino acid can be chemically or genetically modified to cysteine. As one example, serine modification to cysteine is considered a conservative mutation. Another approach to introduce a thiol group in cysteine-lacking peptides is chemical modification of the lysine ε-amino group using thiolating reagents such as 2-iminothiolane (Traut's reagent), SATA (N-succinimidyl S-acetylthioacetate), SATP (N-succinimidyl 5-acetylthiopropionate), SAT-PEO₄-Ac (N-Succinimidyl S-acetyl(thiotetraethylene glycol)), SPDP (N-Succinimidyl 3-(2-pyridyldithio)propionate), LC-SPDP (Succinimidyl 6-(3′-[2-pyridyldithio]propionamido)hexanoate) (described more fully, below). Once a unique thiol group is introduced in the peptide, it can be selectively modified by compounds containing sufhydryl-reactive such as N-maleimides, haloacetyls, and pyridyl disulfides, as described above.

[0369] The conjugation between the CCD or XTEN polypeptide and a peptide, protein or small molecule drug payload may be achieved by a variety of linkage chemistries, including commercially available zero-length, homo- or hetero-bifunctional, and multifunctional cross-linker compounds, according to methods known and available in the art, such as those described, for example, in R. F. Taylor (1991) “Protein immobilization. Fundamentals and Applications”, Marcel Dekker Inc., N.Y.; G. T. Hermanson et al. (1992) “Immobilized Affinity Ligand Techniques”, Academic Press, San Diego; G. T. Hermanson (2008) “Bioconjugate Techniques”, 2^{nd}. ed. Elsevier, Inc., S. S. Wong (1991) “Chemistry of Protein Conjugation and Crosslinking”, CRC Press, Boca Raton. Suitable cross-linking agents for use in preparing the conjugates of the disclosure are commercially-available from companies like Sigma-Aldrich, Thermo Scientific (Pierce and Invitrogen Protein Research Products), ProteoChem, G-Biosciences. Preferred embodiments of cross-linkers comprise a thiol-reactive functional group or an amino-reactive functional group. A list of exemplary cross-linkers is provided in Table 23.

TABLE 23
Exemplary cross-linkers
Cross-linker

maleimides, haloacetyls, pyridyl disulfides, AMAS (N-(α-Maleimidoacetoxy)-succinimide ester),
BMB (1,4-Bis-Maleimidobutane), BMDB (1,4 Bismaleimidyl-2,3-dihydroxybutane), BMH (Bis-
Maleimidohexane), BMOE (Bis-Maleimidoethane), BMPH (N-(β-Maleimidopropionic
acid)hydrazide), BMPS (N-(β-Maleimidopropyloxy)succinimide ester), BM(PEG)₂ (1,8-Bis-
Maleimidodiethylene-glycol), BM(PEG)₃ (1,11-Bis-Maleimidotriethyleneglycol), BS²G (Bis
(sulfosuccinimidyl)glutarate), BS³ (Sulfo-DSS) (Bis (sulfosuccinimidyl)suberate), BS[PEG]₅ (Bis
(NHS)PEG5), BS(PEG)₉ (Bis (NHS)PEG9), BSOCOES (Bis(2-
[succinimidoxycarbonyloxy]ethyl)sulfone), C6-SANH (C6-Succinimidyl 4-hydrazinonicotinate
acetone hydrazone), C6-SFB (C6-Succinimidyl 4-formylbenzoate), DCC (N,N-
Dicyclohexylcarbodiimide), DPDPB (1,4-Di-(3′-[2′pyridyldithio]propionamido) butane), DSG
(Disuccinimidyl glutarate), DSP (Dithiobis(succimidylpropionate), Lomant's Reagent), DSS
(Disuccinimidyl suberate), DST (Disuccinimidyl tartarate), , DTME (Dithiobis-maleimidoethane),
DTSSP (Sulfo-DSP) (3,3′-Dithiobis (sulfosuccinimidylpropionate)), EDC (1-Ethyl-3-(3-
dimethylaminopropyl) carbodiimide hydrochloride), EGS (Ethylene glycol
bis(succinimidylsuccinate)), EMCA (N-ε-Maleimidocaproic acid), EMCH (N-(ε-Maleimidocaproic
acid)hydrazide), EMCS (N-(ε-Maleimidocaproyloxy)succinimide ester), GMBS (N-(γ-
Maleimidobutyryloxy)succinimide ester), KMUA (N-κ-Maleimidoundecanoic acid), KMUH (N-(κ-
Maleimidoundecanoic acid)hydrazide), LC-SMCC (Succinimidyl 4-(N-maleimidomethyl)
cyclohexane-1-carboxy-(6-amidocaproate)), LC-SPDP (Succinimidyl 6-(3′-[2-
pyridyldithio]propionamido)hexanoate), MBS (m-Maleimidobenzoyl-N-hydroxysuccinimide ester),
MPBH (4-(4-N-Maleimidophenyl)-butyric acid hydrazide), PDPH (3-(2-
Pyridyldithio)propionylhydrazide), SANH (Succinimidyl 4-hydrazinonicotinate acetone hydrazone),
SBAP (Succinimdyl 3-(bromoacetamido)propionate), , SFB (Succinimidyl 4-formylbenzoate), SHTH
(Succinimidyl 4-hydrazidoterephthalate), SIA (N-succinimidyl iodoacetate), SIAB (N-
Succinimidyl(4-iodoacetyl)aminobenzoate), SMPB (Succinimidyl 4-(p-maleimidophenyl) butyrate),
SMCC (Succinimidyl 4-(N-maleimido-methyl)cyclohexane-1-carboxylate), SM[PEG]₂ (NHS-PEG2-
Maliemide), SM[PEG]₄ (NHS-PEG4-Maliemide), SM(PEG)₆ (NHS-PEG6-Maleimide), SM[PEG]₈
(NHS-PEG8-Maliemide), SM[PEG]₁₂ (NHS-PEG12-Maliemide), SM(PEG)₂₄ (NHS-PEG24-
Maleimide), SMPB (Succinimidyl 4-(p-maleimido-phenyl)butyrate), SMPH (Succinimidyl-6-(β-
maleimidopropionamido)hexanoate), SMPT (4-Succinimidyloxycarbonyl-methyl-α-(2-
pyridyldithio)toluene), SPB (Succinimidyl-(4-psoralen-8-yloxy)butyrate), SPDP (N-Succinimidyl 3-
(2-pyridyldithio)propionate), Sulfo-DST (Sulfodisuccinimidyl tartrate), Sulfo-EGS (Ethylene glycol
bis (sulfo-succinimidyl succinate)), Sulfo-EMCS (N-(ε-Maleimidocaproyloxy)sulfosuccinimide
ester), Sulfo-GMBS (N-(γ-Maleimidobutryloxy)sulfosuccinimide ester), , Sulfo-KMUS (N-(κ-
Maleimidoundecanoyloxy)sulfosuccinimide ester), Sulfo-LC-SMPT (Sulfosuccinimidyl 6-(α-methyl-
α-[2-pyridyldithio]-toluamido)hexanoate), Sulfo-LC-SPDP (Sulfosuccinimidyl 6-(3′-[2-
pyridyldithio]propionamido)hexanoate), Sulfo-MBS (m-Maleimidobenzoyl-N-
hydroxysulfosuccinimide ester), Sulfo-SIA (N-sulfosuccinimidyl iodoacetate), Sulfo-SIAB
(Sulfosuccinimidyl(4-iodo-acetyl)aminobenzoate), Sulfo-SMCC (Sulfosuccinimidyl 4-(N-
maleimidomethyl)cyclohexane-1-carboxylate), Sulfo-SMPB (Sulfosuccinimidyl 4-(p-
maleimidophenyl)butyrate), TMEA (Tris-(2-Maleimidoethyl)amine), TSAT (Tris-(succinimidyl
aminotriacetate)), 3-propargyloxypropanoic acid NHS ester, acetylene-PEG-NHS ester,
dibenzylcyclooctyne (DBCO)-NHS ester, DBCO-PEG-NHS ester, cyclooctyne (COT)-NHS ester,
COT-PEG-NHS ester, COT-PEG-pentafluorophenyl (PFP) ester, BCOT-NHS ester, BCOT-PEG-
NHS ester, BCOT-PEG-pentafluorophenyl (PFP) ester, Acetylene-PEG4-maleimide, DBCO-
maleimide, COT-maleimide, BCOT-maleimide, 3-azide-propionic acid NHS ester, 6-azide-hexanoic
acid NHS ester, 3-azide-propionic acidPFP ester, 6-azide-hexanoic acid PFP ester, azide-PEG-NHS
ester, azide-PEG-PFP ester, azide-PEG-maleimide

[0370] Non-limiting examples of cross-linkers are BMB (1,4-Bis-Maleimidobutane), BMDB (1,4 Bismaleimidyl-2,3-dihydroxybutane), BMH (Bis-Maleimidohexane), BMOE (Bis-Maleimidoethane), BMPH (N-(β-Maleimidopropionic acid)hydrazide), BMPS (N-(β-Maleimidopropyloxy)succinimide ester), BM(PEG)₂ (1,8-Bis-Maleimidodiethylene-glycol), BM(PEG)₃ (1,11-Bis-Maleimidotriethyleneglycol), BS²G (Bis (sulfosuccinimidyl)glutarate), BS³ (Sulfo-DSS) (Bis (sulfosuccinimidyl)suberate), BS[PEG]₅ (Bis (NHS)PEG5), BS(PEG)₉ (Bis (NHS)PEG9), BSOCOES (Bis(2-[succinimidoxycarbonyloxy]ethyl)sulfone), C6-SANH (C6-Succinimidyl 4-hydrazinonicotinate acetone hydrazone), C6-SFB (C6-Succinimidyl 4-formylbenzoate), DCC (N,N-Dicyclohexylcarbodiimide), DPDPB (1,4-Di-(3′-[2′pyridyldithio]propionamido) butane), DSG (Disuccinimidyl glutarate), DSP (Dithiobis(succimidylpropionate), Lomant's Reagent), DSS (Disuccinimidyl suberate), DST (Disuccinimidyl tartarate), DTME (Dithiobis-maleimidoethane), DTSSP (Sulfo-DSP) (3,3′-Dithiobis (sulfosuccinimidylpropionate)), EDC (1-Ethyl-3-(3-dimethylaminopropyl) carbodiimide hydrochloride), EGS (Ethylene glycol bis(succinimidylsuccinate)), EMCA (N-E-Maleimidocaproic acid), EMCH (N-(ε-Maleimidocaproic acid)hydrazide), EMCS (N-(E-Maleimidocaproyloxy)succinimide ester), GMBS (N-(γ-Maleimidobutyryloxy)succinimide ester), KMUA (N-κ-Maleimidoundecanoic acid), KMUH (N-(κ-Maleimidoundecanoic acid)hydrazide), LC-SMCC (Succinimidyl 4-(N-maleimidomethyl) cyclohexane-1-carboxy-(6-amidocaproate)), LC-SPDP (Succinimidyl 6-(3′-[2-pyridyldithio]propionamido)hexanoate), MBS (m-Maleimidobenzoyl-N-hydroxysuccinimide ester), MPBH (4-(4-N-Maleimidophenyl)-butyric acid hydrazide), SBAP (Succinimdyl 3-(bromoacetamido)propionate), SFB (Succinimidyl 4-formylbenzoate), SHTH (Succinimidyl 4-hydrazidoterephthalate), SIA (N-succinimidyl iodoacetate), SIAB (N-Succinimidyl(4-iodoacetyl)aminobenzoate), SMPB (Succinimidyl 4-(p-maleimidophenyl) butyrate), SMCC (Succinimidyl 4-(N-maleimido-methypcyclohexane-1-carboxylate), SM[PEG]₂ (NHS-PEG2-Maliemide), SM[PEG]₄ (NHS-PEG4-Maliemide), SM(PEG)₆ (NHS-PEG6-Maleimide), SM[PEG]₈ (NHS-PEG8-Maliemide), SM[PEG]₁₂ (NHS-PEG12-Maliemide), SM(PEG)₂₄ (NHS-PEG24-Maleimide), SMPB (Succinimidyl 4-(p-maleimido-phenyl)butyrate), SMPH (Succinimidyl-6-(β-maleimidopropionamido)hexanoate), SMPT (4-Succinimidyloxycarbonyl-methyl-α-(2-pyridyldithio)toluene), SPB (Succinimidyl-(4-psoralen-8-yloxy)butyrate), SPDP (N-Succinimidyl 3-(2-pyridyldithio)propionate), Sulfo-DST (Sulfodisuccinimidyl tartrate), Sulfo-EGS (Ethylene glycol bis (sulfo-succinimidyl succinate)), Sulfo-EMCS (N-(ε-Maleimidocaproyloxy)sulfosuccinimide ester), Sulfo-GMBS (N-(γ-Maleimidobutryloxy)sulfosuccinimide ester), Sulfo-KMUS (N-(κ-Maleimidoundecanoyloxy)sulfosuccinimide ester), Sulfo-LC-SMPT (Sulfosuccinimidyl 6-(α-methyl-α-[2-pyridyldithio]-toluamido)hexanoate), Sulfo-LC-SPDP (Sulfosuccinimidyl 6-(3′-[2-pyridyldithio]propionamido)hexanoate), Sulfo-MBS (m-Maleimidobenzoyl-N-hydroxysulfosuccinimide ester), Sulfo-SIAB (Sulfosuccinimidyl(4-iodo-acetyl)aminobenzoate), Sulfo-SMCC (Sulfosuccinimidyl 4-(N-maleimidomethyl)cyclohexane-1-carboxylate), Sulfo-SMPB (Sulfosuccinimidyl 4-(p-maleimidophenyl)butyrate), TMEA (Tris-(2-Maleimidoethyl)amine), TSAT (Tris-(succinimidyl aminotriacetate)).

[0371] In some embodiments, CCD-conjugates or XTEN-conjugates using cross-linking reagents introduce non-natural spacer arms. However, in cases where a native peptide bond is preferred, the invention provides that a reaction can be carried out using zero-length cross-linkers that act via activation of a carboxylate group. In the embodiments thereof, in order to achieve reaction selectivity, the first polypeptide has to contain only a free C-terminal carboxyl group while all lysine, glutamic acid and aspartic acid side chains are protected and the second peptide/protein N-terminal α-amine has to be the only available unprotected amino group (requiring that any lysines, asparagines or glutamines be protected). In such cases, use of XTEN AG family sequences of Table 10 that are without glutamic acid as the first polypeptide in the XTEN-conjugate or XTEN-cross-linker is preferred. Accordingly, in one embodiment, the invention provides XTEN-cross-linker and XTEN-conjugate comprising AG XTEN sequences wherein the compositions are conjugated to payloads using a zero-length cross-linkers. Exemplary zero-length cross-linkers utilized in the embodiment include but are not limited to DCC (N,N-Dicyclohexylcarbodiimide) and EDC (1-Ethyl-3-(3-dimethylaminopropyl) carbodiimide hydrochloride) wherein the cross-linikers are used to directly conjugate carboxyl functional groups of one molecule (such as a payload) to the primary amine of another molecule, such as a payload with that functional group (see FIG. 6). Sulfo-NHS (N-hydroxysulfosuccinimide) and NHS (N-hydroxysuccinimide) are used as catalysts for conjugation, increasing reaction efficiency (Grabarek Z, Gergely J. Zero-length crosslinking procedure with the use of active esters. (1990) Anal. Biochem. 185(1), 131-135). EDC reacts with carboxylic acid group and activates the carboxyl group to form an active O-acylisourea intermediate, allowing it to be coupled to the amino group in the reaction mixture. The O-acylisourea intermediate is unstable in aqueous solutions, making it ineffective in two-step conjugation procedures without increasing the stability of the intermediate using N-hydroxysuccinimide This intermediate reacts with a primary amine to form an amide derivative. The crosslinking reaction is usually performed between pH 4.5 to 5 and requires only a few minutes for many applications. However, the yield of the reaction is similar at pH from 4.5 to 7.5. The hydrolysis of EDC is a competing reaction during coupling and is dependent on temperature, pH and buffer composition. 4-Morpholinoethanesulfonic acid (MES) is an effective carbodiimide reaction buffer. Phosphate buffers reduce the reaction efficiency of the EDC, but increasing the amount of EDC can compensate for the reduced efficiency. Tris, glycine and acetate buffers may not be used as conjugation buffers.

[0372] The disclosure also provides compositions in which three components of the targeted conjugate compositions, such as portrayed in formula VIII, below, or FIG. 34C, in which two XTENs are linked by trivalent cross-linkers to the fusion protein, resulting in trimeric conjugates. The invention also contemplates configurations wherein three molecules of a fusion protein of formula I-VII are linked by the cysteine-engineered XTEN components of the fusion proteins using trimeric cross-linkers. Trimeric cross-linkers can be created based on synthetic peptides Ac-Cys-Ser-Pro-Cys-Ser-Pro-Cys-NH₂ (SEQ ID NO: 605) or Ac-Lys-Ser-Pro-Lys-Ser-Pro-Lys-NH₂ (SEQ ID NO: 606) with various reactive side groups described in Table 24, using standard conjugation techniques.

TABLE 24
Trivalent Cross-linkers
Trivalent Cross-linker

| Trivalent Core | Group 1 | Group 2 | Group 3 |
|---|---|---|---|
| Ac- | Lys(azidoacetyl) | Lys(azidoacetyl) | Lys(azidoacetyl) |
| KSPKSPK- | Lys(maleimidopropyonyl) | Lys(maleimidopropyonyl) | Lys(maleimidopropyonyl) |
| NH₂ (SEQ ID | Lys(bromoacetyl) | Lys(bromoacetyl) | Lys(bromoacetyl) |
| NO: 606) | Lys(iodoacetyl) | Lys(iodoacetyl) | Lys(iodoacetyl) |
| AcCSPCSPC- | Cys | Cys | Cys |
| NH₂ (SEQ ID | | | |
| NO: 605) | | | |

[0373] In other embodiments, CCD or XTEN and payloads can be conjugated using a broad group of cross-linkers, including those consisting of a spacer arm (linear or branched) and two or more reactive ends that are capable of attaching to specific functional groups (e.g., primary amines, sulfhydryls, etc.) on proteins or other molecules. Linear cross-linkers can be homobifunctional or heterobifunctional. Homobifunctional cross-linkers have two identical reactive groups which are used to cross-link proteins in one step reaction procedure. Non-limiting examples of amine-reactive homobifunctional cross-linkers are BS2G (Bis (sulfosuccinimidyl)glutarate), BS3 (Sulfo-DSS) (Bis (sulfosuccinimidyl)suberate), BS[PEG]5 (Bis (NHS)PEGS), BS(PEG)9 (Bis (NHS)PEG9), BSOCOES (Bis(2-[succinimidoxycarbonyloxy]ethyl)sulfone), DSG (Disuccinimidyl glutarate), DSP (Dithiobis(succimidylpropionate) (Lomant's Reagent), DSS (Disuccinimidyl suberate), DST (Disuccinimidyl tartarate), DTSSP (Sulfo-DSP) (3,3′-Dithiobis (sulfosuccinimidyl propionate)), EGS (Ethylene glycol bis(succinimidylsuccinate)), Sulfo-EGS (Ethylene glycol bis (sulfo-succinimidyl succinate)).

[0374] Additionally, examples of homobifunctional cross-linkers employed in the compositions and in the methods to create the CCD-conjugate and/or XTEN-conjugate and/or CCD-cross-linker and/or XTEN-cross-linker compositions are sulfhydryl-reactive agents such as BMB (1,4-Bis-Maleimidobutane), BMH (Bis-Maleimidohexane), BMDB (1,4 Bismaleimidyl-2,3-dihydroxybutane), BMOE (Bis-Maleimidoethane), BM(PEG)2 (1,8-Bis-Maleimidodiethylene-glycol), BM(PEG)3 (1,11-Bis-Maleimidotriethyleneglycol), DPDPB (1,4-Di-(3′-[2′pyridyldithio]propionamido) butane), DTME (Dithiobis-maleimidoethane).

[0375] For the creation of CCD-cross-linker and XTEN-cross-linker conjugates for subsequent conjugation to payloads, heterobifunctional cross-linkers are preferred as the sequential reactions can be controlled. As heterobifunctional cross-linkers possess two different reactive groups, their use in the compositions allows for sequential two-step conjugation. A heterobifunctional reagent is reacted with a first protein using the more labile group. In one embodiment, the conjugation of the heterobifunctional cross-linker to a reactive group in a CCD or an XTEN results in a CCD-cross-linker or an XTEN-cross-linker conjugate, respectively. After completing the reaction and removing excess unreacted cross-linker, the modified protein (such as the XTEN-cross-linker) can be added to the payload which interacts with a second reactive group of the cross-linker, resulting in a CCD-conjugate or an XTEN-conjugate. Most commonly used heterobifunctional cross-linkers contain an amine-reactive group at one end and a sulfhydryl-reactive group at the other end. Accordingly, these cross-linkers are suitable for use with cysteine- or lysine-engineered XTEN, or with the alpha-amino group of the N-terminus of the XTEN. Non-limiting examples of heterobifunctional cross-linkers are AMAS (N-(α-Maleimidoacetoxy)-succinimide ester), BMPS (N-(β-Maleimidopropyloxy)succinimide ester), EMCS (N-(ε-Maleimidocaproyloxy)succinimide ester), GMBS (N-(γ-Maleimidobutyryloxy)succinimide ester), LC-SMCC (Succinimidyl 4-(N-maleimidomethyl) cyclohexane-1-carboxy-(6-amidocaproate)), LC-SPDP (Succinimidyl 6-(3′-[2-pyridyldithio]propionamido)hexanoate), MBS (m-Maleimidobenzoyl-N-hydroxysuccinimide ester), SBAP (Succinimdyl 3-(bromoacetamido)propionate), SIA (N-succinimidyl iodoacetate), SIAB (N-Succinimidyl(4-iodoacetyl)aminobenzoate), SMPB (Succinimidyl 4-(p-maleimidophenyl) butyrate), SMCC (Succinimidyl 4-(N-maleimido-methypcyclohexane-1-carboxylate), SM[PEG]₂ (NHS-PEG2-Maliemide), SM[PEG]₄ (NHS-PEG4-Maliemide), SM(PEG)₆ (NHS-PEG6-Maleimide), SM[PEG]₈ (NHS-PEG8-Maliemide), SM[PEG]₁₂ (NHS-PEG12-Maliemide), SM(PEG)₂₄ (NHS-PEG24-Maleimide), SMPB (Succinimidyl 4-(p-maleimido-phenyl)butyrate), SMPH (Succinimidyl-6-β-maleimidopropionamido)hexanoate), SMPT (4-Succinimidyloxycarbonyl-methyl-α-(2-pyridyldithio)toluene), SPDP (N-Succinimidyl 3-(2-pyridyldithio)propionate), Sulfo-EMCS (N-(ε-Maleimidocaproyloxy)sulfosuccinimide ester), Sulfo-GMBS (N-(γ-Maleimidobutryloxy)sulfosuccinimide ester), Sulfo-KMUS (N-(κ-Maleimidoundecanoyloxy)sulfosuccinimide ester), Sulfo-LC-SMPT (Sulfosuccinimidyl 6-(α-methyl-α-[2-pyridyldithio]-toluamido)hexanoate), Sulfo-LC-SPDP (Sulfosuccinimidyl 6-(3′-[2-pyridyldithio]propionamido)hexanoate), Sulfo-MBS (m-Maleimidobenzoyl-N-hydroxysulfosuccinimide ester), Sulfo-SIAB (Sulfosuccinimidyl(4-iodo-acetyl)aminobenzoate), Sulfo-SMCC (Sulfosuccinimidyl 4-(N-maleimidomethyl)cyclohexane-1-carboxylate), Sulfo-SMPB (Sulfosuccinimidyl 4-(p-maleimidophenyl)butyrate). An example of a heterobifunctional cross-linker that allows covalent conjugation of amine- and sulfhydryl-containing molecules is Sulfo-SMCC (Sulfo Sulfosuccinimidyl 4-(N-maleimidomethyl)cyclohexane-1-carboxylate). Sulfo-SMCC is a water soluble analog of SMCC that can be prepared in aqueous buffers up to 10 mM concentration. The cyclohexane ring in the spacer arm of this cross-linker decreases the rate of hydrolysis of the maleimide group compared to similar reagents not containing this ring. This feature enables CCD or XTEN that have been maleimide-activated with SMCC or Sulfo-SMCC to be lyophilized and stored for later conjugation to a sulfhydryl-containing molecule. Thus, in one embodiment, the invention provides an XTEN-cross-linker having an XTEN having at least about 80% sequence identity, or at least about 90%, or about 91%, or about 92%, or about 93%, or about 94%, or about 95%, or about 96%, or about 97%, or about 98%, or about 99% sequence identity, or is identical to a sequence or a fragment of a sequence selected from of Table 11, when optimally aligned, wherein XTEN-cross-linker has one or more cross-linkers of sulfo-SMCC linked to the α-amino group of the XTEN or the ε-amine of a lysine-engineered XTEN. In another embodiment, the invention provides an XTEN-cross-linker having an XTEN having at least about 80% sequence identity, or at least about 90%, or about 91%, or about 92%, or about 93%, or about 94%, or about 95%, or about 96%, or about 97%, or about 98%, or about 99% sequence identity, or is identical to a sequence or a fragment of a sequence selected from of Table 10, when optimally aligned, wherein the XTEN-cross-linker has one sulfo-SMCC linked to the amino group of the N-terminus of the XTEN. The foregoing described heterobifunctional cross-linkers conjugate two molecules via a single amine and a single cysteine. A special type of cross-linker was developed for site-specific conjugation to disulfide bridges in proteins (Balan S. et al. Site-specific PEGylation of protein disulfide bonds using a three-carbon bridge. (2007) Bioconjugate Chem. 18, 61-76; Brocchini S. et al. Disulfide bridge based PEGylation of proteins. (2008) Advanced Drug Delivery Reviews 60, 3-12). First, the linker is synthesized as an amine-specific 4[2,2-bis[p-tolylsulfonyl)methyl]acetyl) benzoic acid-NHS ester. This molecule can be covalently attached to the amino group of a CCD or XTEN yielding-Bis(sulfone) or XTEN-Bis(sulfone), respectively. Incubation of the latter molecule in 50 mM sodium phosphate buffer, pH 7.8, will result in elimination of toluene sulfinic acid to generate XTEN-α,β-unsaturated β′-monosulfone. The resulting molecule will react with a disulfide bridge-containing payload protein in a site-specific manner. In a first step the disulfide bridge is converted into two thiols by reduction. In a second step, the CCD-monosulfone or XTEN-monosulfone bis-alkylates two cysteines resulting in a chemically-stable three-carbon bridge. The same α,β-unsaturated β′-monosulfone can be used not only for conjugation to two thiol groups derived from a disulfide bridge but also for conjugation to polyhistidine tags (Cong Y. et al. Site-specific PEGylation at histidine tags. (2012) Bioconjugate Chem. 23, 248-263).

[0376] Conjugation using cross-linker compositions with the sulfo-SMCC is usually performed in a two-step process. In one embodiment, the amine-containing protein is prepared in conjugation buffer of, e.g., phosphate-buffered saline (PBS=100 mM sodium phosphate, 150 mM sodium chloride, pH 7.2) or a comparable amine- and sulfhydryl-free buffer at pH 6.5-7.5. The addition of EDTA to 1-5 mM helps to chelate divalent metals, thereby reducing disulfide formation in the sulfhydryl-containing protein. The concentration of the amine-containing protein determines the cross-linker molar excess to be used. In general, in protein samples of <1 mg/ml utilize an 40-80-fold molar excess, protein samples of 1-4 mg/ml utilize a 20-fold molar excess, and protein samples of 5-10 mg/ml utilize a 5- to 10-fold molar excess of the cross-linker. The reaction mixture (amine-containing protein and cross-linker) is incubated for 30 minutes at room temperature or 2 hours at 4° C. and then the excess cross-linker is removed using a desalting column equilibrated with conjugation buffer. In the case of preparing a CCD-cross-linker or XTEN-cross-linker, the composition would be held at that point. In embodiments wherein the CCD-cross-linker or XTEN-cross-linker is conjugated to a payload, the sulfhydryl-containing payload and the cross-linker conjugate are mixed in a molar ratio corresponding to that desired for the final conjugate (taking into account the number of expected cross-linkers conjugated to one or more amino groups per molecule of the CCD or XTEN) and consistent with the single sulfhydryl group that exists on the payload. The reaction mixture is incubated at room temperature for 30 minutes or 2 hours at 4° C. Conjugation efficiency can be estimated by SDS-PAGE followed by protein staining or by appropriate analytical chromatography technique such as reverse phase HPLC or cation/anion exchange chromatography.

[0377] In one embodiment, the invention provides conjugate compositions created using cross-linkers that are multivalent, resulting in compositions that have 2, 3, 4, 5, 6 or more XTEN using the synthetic peptides of composition Ac-(Lys*-Ser-Pro)ₙ-Lys*-NH₂ (SEQ ID NO: 607) (where n=1, 2, 3, 4, 5, etc., and Lys* is Lysine with ε-amino group modified to azide, maleimide, iodoacetyl, bromoacetyl, etc.). In another embodiment, the invention provides conjugate compositions created using cross-linkers that are multivalent, resulting in compositions that have 2, 3, 4, 5, 6 or more XTEN linked to 1, 2, 3, 4, 5, 6 or more different payloads. Non-limiting examples of multivalent trifunctional cross-linkers are “Y-shaped” sulfhydryl-reactive TMEA (Tris-(2-Maleimidoethyl)amine) and amine-reactive TSAT (Tris-(succimimidyl aminotricetate). Any combination of reactive moieties can be designed using a scaffold polymer, either linear or branched, for multivalent compositions. Not to be bound by a particular theory, a conjugate composition having three XTEN linked by a trifunctional linker (with payloads linked, in turn to CCD via incorporated cysteine residues) can utilize proportionally shorter XTEN for each “arm” of the construct compared to a monovalent XTEN composition wherein the same number of payloads are linked to the incorporated cysteine amino residues of each CCD, and the resulting trimeric targeted-conjugate composition will have a comparable apparent molecular weight and hydrodynamic radius as the monomeric XTEN-conjugate composition, yet will have lower viscosity, aiding administration of the composition to the subject through small-bore needles, and will provide equal or better potency from the payloads due to reduced steric hindrance and increased flexibility of the composition compared to the monomeric composition having an equivalent number of XTEN amino acids.

[0378] Cross-linkers can be classified as either “homobifunctional” or “heterobifunctional” wherein homobifunctional cross-linkers have two or more identical reactive groups and are used in one-step reaction procedures to randomly link or polymerize molecules containing like functional groups, and heterobifunctional cross-linkers possess different reactive groups that allow for either single-step conjugation of molecules that have the respective target functional groups or allow for sequential (two-step) conjugations that minimize undesirable polymerization or self-conjugation. In a preferred embodiment, where CCD-cross-linkers or XTEN-cross-linkers are prepared and isolated as compositions for subsequent reaction, the CCD-cross-linker or XTEN-cross-linker is linked to a heterbifunctional cross-linker and has at least one reactive group available for subsequent reaction.

[0379] In one embodiment, the invention provides conjugate compositions that are conjugated utilizing cleavable cross-linkers with disulfide bonds. Typically, the cleavage is effected by disulfide bond reducing agents such as β-mercaptoethanol, DTT, TCEP, however it is specifically contemplated that such compositions would be cleavable endogenously in a slow-release fashion by conditions with endogenous reducing agents (such as cysteine and glutathione). The following are non-limiting examples of such cross-linkers: DPDPB (1,4-Di-(3′-[2′pyridyldithio]propionamido) butane), DSP (Dithiobis(succimidylpropionate) (Lomant's Reagent), DTME (Dithiobis-maleimidoethane), DTSSP (Sulfo-DSP) (3,3′-Dithiobis (sulfosuccinimidylpropionate)), LC-SPDP (Succinimidyl 6-(3′-[2-pyridyldithio]propionamido)hexanoate), PDPH (3-(2-Pyridyldithio)propionylhydrazide), SMPT (4-Succinimidyloxycarbonyl-methyl-α-(2-pyridyldithio)toluene), SPDP (N-Succinimidyl 3-(2-pyridyldithio)propionate), Sulfo-LC-SMPT (Sulfosuccinimidyl 6-(α-methyl-α-[2-pyridyldithio]-toluamido)hexanoate), Sulfo-LC-SPDP (Sulfosuccinimidyl 6-(3′-[2-pyridyldithio]propionamido)hexanoate). In another embodiment, XTEN-conjugates comprising BSOCOES (Bis(2-[succinimidoxycarbonyloxy]ethyl)sulfone) can be cleaved under alkaline conditions. In another embodiment, XTEN-conjugates comprising DST (Disuccinimidyl tartarate) and BMDB (1,4 Bismaleimidyl-2,3-dihydroxybutane) can be cleaved by periodate oxidation. EGS (Ethylene glycol bis(succinimidylsuccinate)) and Sulfo-EGS (Ethylene glycol bis (sulfo-succinimidyl succinate)) are cleaved by hydroxylamine but would be expected to be cleaved endogenously such that the active payload would be released from the conjugate.

[0380] In general, the conjugation reagents described above assume that a cross-linker is reactive with the otherwise stable and inert groups such as amines, sulfhydryls and carboxyls. In other embodiments, the invention provides a different approach of conjugation based on separate modifications of the CCD, XTEN and payload with two functional groups which are stable and inactive toward biopolymers in general yet highly reactive toward each other. Several orthogonal reactions have been grouped under the concept of click chemistry, which provides XTEN-azide/alkyne reactants that have good stability properties and are therefore particularly suited as reagents for subsequent conjugation with payloads in a separate reaction (Kolb H. C., Finn M. G., Sharpless K. B. Click chemistry: diverse chemical function from a few good reactions. (2001) Angew. Chem. Int. Ed. Engl. 40(11), 2004-2021). Generally, click chemistry is used as a reaction concept which embraces reactions involving (1) alkyne-azide; (2) “ene”-thiol, and (3) aldehyde-hydrazide, and the invention contemplates use of all three. One example is the Huisgen 1,3-dipolar cycloaddition of alkynes to azides to form 1,4-disubsituted-1,2,3-triazoles, shown in FIG. 7. Azide and alkyne moieties can be introduced into peptide/protein or drug payloads or into XTEN by chemical modification of N-terminal α-amino groups, ε-amino groups of lysine, and sulfhydryl groups of cysteine. Table 25 provides non-limiting examples of click chemistry reactants contemplated for use in the making of the conjugate compositions, wherein one component of the intended conjugate (CCD, XTEN or a payload) is reacted with a reactant 1 of the Table and the second component (CCD, XTEN, or a payload) is reacted with a azide reactant 2 of the Table. For example, one molecule is modified with an alkyne moiety using an amine-reactive alkyne, such as 3-propargyloxypropanoic acid, NHS ester, acetylene-PEG4-NHS ester, dibenzylcyclooctyne (DBCO)-NHS ester, DBCO-PEG4-NHS ester, cyclooctyne (COT)-PEG2-NHS ester, COT-PEG3-NHS ester, COT-PEG4-NHS ester, COT-PEG2-pentafluorophenyl (PFP) ester, COT-PEG3-PFP ester, COT-PEG4-PFP ester, BCOT-PEG2-NHS ester, BCOT-PEG3-NHS ester, BCOT-PEG4-NHS ester, BCOT-PEG2-PFP ester, BCOT-PEG3-PFP ester, BCOT-PEG4-PFP ester. Alternatively, the molecule is modified with a sulfhydryl-reactive alkyne such as acetylene-PEG4-Maleimide, DBCO-Maleimide, or DBCO-PEG4-Maleimide. The second molecule is modified with azide-PEG2-NHS ester, azide-PEG3-NHS ester, azide-PEG4-NHS ester, azide-PEG2-PFP ester, azide-PEG3-PFP ester, azide-PEG4-PFP ester or azide-PEG4-Maleimide. The azide and alkyne moieties can be used interchangeably; they are biologically unique, stable and inert towards biological molecules and aqueous environments. When mixed, the azide and alkyne reactants form an irreversible covalent bond without any side reactions (Moses J. E. and Moorhouse A. D. The growing applications of click chemistry. (2007) Chem. Soc. Rev. 36, 1249-1262; Breinbauer R. and Kohn M. Azide-alkyne coupling: a powerful reaction for bioconjugate chemistry. (2003) ChemBioChem 4(11), 1147-1149; Rostovtsev V. V., Green L. G., Fokin V. V., Sharpless K. B. A stepwise Huisgen cycloaddition process: copper(I)-catalyzed regioselective “ligation” of azides and terminal alkynes.(2002) Angew Chem Int Ed Engl. 41(14), 2596-2599). In one embodiment, the invention provides a conjugate comprising a first XTEN conjugated to a second XTEN wherein the first XTEN is linked to a alkyne reactant 1 from Table 25, the second XTEN is linked to a azide reactant 2 from Table 25, and then the first XTEN and the second XTEN are linked under conditions effective to react the alkyne reactant 1 and the azide reactant 2, resulting in the XTEN-XTEN conjugate. In another embodiment, the invention provides a conjugate comprising a first CCD conjugated to a payload wherein the CCD is linked to a alkyne reactant 1 from Table 25, the payload is linked to a azide reactant 2 from Table 25, and then the CCD and the payload are linked under conditions effective to react the alkyne reactant 1 and the azide reactant 2, resulting in the CCD-payload-conjugate. In another embodiment, the invention provides a conjugate comprising a first CCD conjugated to a payload wherein the CCD is linked to a azide reactant 2 from Table 25, the payload is linked to a alkyne reactant 1 from Table 25, and then the CCD and the payload are linked under conditions effective to react the alkyne reactant 1 and the azide reactant 2, resulting in the CCD-payload conjugate. In the foregoing embodiments, the conditions to effect the reactions are those described herein or are reaction conditions known in the art for the conjugation of such reactants. The invention also contemplates the various combinations of the foregoing conjugates; e.g., a CCD-payload conjugate in which the components are linked by click chemistry reactants and in which one CCD further comprises one or more molecules of a payload conjugated to the CCD using click chemistry, an XTEN-CCD conjugate in which the components are linked by click chemistry reactants in which one CCD further comprises one or more molecules of a first payload conjugated to the CCD using click chemistry and the XTEN further comprises one or more molecules of a second payload conjugated to the XTEN using click chemistry. Additional variations on these combinations will be readily apparent to those of ordinary skill in the art.

TABLE 25
Alkyne and Azide Click-chemistry Reactants

| | Attached | | Attached |
|---|---|---|---|
| Alkyne Reactant 1 | to: | Azide Reactant 2 | to: |
| 3-propargyloxypropanoic | Amine | 3-azide-propionic acid, | Amine |
| acid, NHS ester* | | NHS ester* | |
| acetylene-(oxyethyl)ₙ- | Amine | 6-azide-hexanoic acid, | Amine |
| NHS ester*, where n is | | NHS ester* | |
| 1-10 | | | |
| dibenzylcyclooctyne | Amine | 3-azide-propionic acid, | Amine |
| (DBCO)-NHS ester* | | PFP ester | |
| DBCO-(oxyethyl)ₙ-NHS | Amine | 6-azide-hexanoic acid, | Amine |
| ester*, where n is 1-10 | | PFP ester | |
| cyclooctyne (COT)-NHS | Amine | azide-(oxyethyl)ₙNHS | Amine |
| ester* | | ester*, where n is 1-10 | |
| COT-(oxyethyl)ₙ-NHS | Amine | azide-(oxyethyl)ₙ-PFP | Amine |
| ester*, where n is 1-10 | | ester, where n is 1-10 | |
| COT-(oxyethyl)ₙ- | Amine | 1-azido-3,6,9,12- | Amine |
| pentafluorophenyl (PFP) | | tetraoxapentadecan-15- | |
| ester, where n is 1-10 | | oic acid N-hydroxy- | |
| | | succinimide ester | |
| BCOT-NHS ester* | Amine | azide-(oxyethyl)ₙ- | Thiol |
| | | maleimide, where n is | |
| | | 1-10 | |
| BCOT-(oxyethyl)ₙ-NHS | Amine | | |
| ester*, where n is 1-10 | | | |
| BCOT-(oxyethyl)ₙ- | Amine | | |
| pentafluorophenyl | | | |
| (PFP) ester, where | | | |
| n is 1-10 | | | |
| 6-(11,12-didehydro- | Amine | | |
| dibenzo[b,f]azocin- | | | |
| 5(6H)-yl)-6-oxohexanoic | | | |
| acid N-hydroxysulfo- | | | |
| succinimide ester | | | |
| acetylene-(oxyethyl)ₙ- | Thiol | | |
| maleimide, where n is | | | |
| 1-10 | | | |
| DBCO-maleimide | Thiol | | |
| COT-maleimide | Thiol | | |
| BCOT-maleimide | Thiol | | |

*could be either NHS ester or sulfo-NHS ester

[0381] In some embodiments, the XTEN-conjugates and the CCD-conjugates are conjugated using thio-ene based click chemistry that proceeds by free radical reaction, termed thiol-ene reaction, or anionic reaction, termed thiol Michael addition (Hoyle C. E. and Bowman C. N. Thiol-ene click chemistry. (2010) Angew. Chem. Int. Ed. 49, 1540-1573). It particular, is believed that thiol Michael addition is better suited for targeted conjugate compositions wherein the payload is a protein (Pounder R. J. et. al. Metal free thiol-maleimide ‘Click’ reaction as a mild functionalisation strategy for degradable polymers. (2008) Chem Commun (Camb). 41, 5158-5160). As at least one molecule needs to contain a free thiol group, a CCD can be utilized if the payload does not contain cysteine. Alternatively, the thiol group can be introduced by chemical modification of N-terminal α-amino group or the lysine ε-amino groups of either the XTEN, the CCD, or the payload peptide/protein using thiolating reagents such as 2-iminothiolane (Traut's reagent), SATA (N-succinimidyl 5-acetylthioacetate), SATP (N-succinimidyl S-acetylthiopropionate), SAT-PEO₄-Ac (N-Succinimidyl S-acetyl(thiotetraethylene glycol)), SPDP (N-Succinimidyl 3-(2-pyridyldithio)propionate), LC-SPDP (Succinimidyl 6-(3′-[2-pyridyldithio]propionamido)hexanoate). Such methods are known in the art (Carlsson J. et al. (1978) Biochem. J. 173, 723-737; Wang D. et al. (1997) Bioconjug. Chem. 8, 878-884; Traut R. R. et al. (1973) Biochemistry 12(17), 3266-3273; Duncan, R. J. S. et.al. (1983) Anal. Biochem. 132. 68-73; U.S. Pat. No. 5,708,146). The second component of thiol-Michael addition reaction requires a reagent with electron-deficient carbon-carbon double bond, such as in (meth)acrylates, maleimides, α,β-unsaturated ketones, fumarate esters, acrylonitrile, cinnamates, and crotonates. The N-maleimides are commonly used as sulfhydryl-reactive functionalities and can be introduced into the payload, the CCD, or the XTEN molecule via N-terminal α-amino group or Lys ε-amino group modification using commercially available heterobifunctional cross-linkers such as AMAS (N-(α-Maleimidoacetoxy)-succinimide ester), BMPS (N-(β-Maleimidopropyloxy)succinimide ester) and others described above. The resulting two molecules containing free thiol and maleimide moieties, respectively, form a stable covalent bond under mild conditions, resulting in a conjugate linked by maleimide.

[0382] In other embodiments, XTEN-conjugates, XTEN-XTEN conjugates and CCD-conjugates are created utilizing click chemistry based on reactions between hydrazides and aldehydes, such as described by Ganguly et al. and as shown in FIG. 7 (Ganguly T. et al. The hydrazide/hydrazone click reaction as a biomolecule labeling strategy for M(CO)3 (M=Re, 99 mTc) radiopharmaceuticals. (2011) Chem. Commun. 47, 12846-12848). For example, an CCD can be modified to have a hydrazine or hydrazide that is mixed with a payload having an aldehyde group to yield the desired CCD-payload conjugate. In one embodiment, the invention provides CCD with at least one hydrazine or hydrazide introduced in either the α-N-terminal amino group or, alternatively one or more lysine ε-amino groups are modified to provide an CCD suitable as a reagent for conjugation to a target payload as it is considered to be stable. The resulting bis-arylhydrazones formed from aromatic hydrazines and aromatic aldehydes are stable to 92° C. and a wide range of pH values from 2.0-10.0 (Solulink, Inc., Protein-Protein Conjugation Kit, Technical Manual, Catalog #S-9010-1). The leaving group in the reaction is water and no reducing agents (e.g., sodium cyanoborohydride) are required to stabilize the bond. Molecules modified with either hydrazine/hydrazide or aldehyde moieties have good stability in aqueous environments and remain active without special handling requirements. The amino group(s) of the CCD molecule are modified by NHS-ester/hydrazide, such as SANH (succinimidyl 4-hydrazinonicotinate acetone hydrazone), C6-SANH (C6-Succinimidyl 4-hydrazinonicotinate acetone hydrazone), SHTH (Succinimidyl 4-hydrazidoterephthalate hydrocholoride). In a typical reaction, a protein is prepared as 1-5 mg/ml solution in modification buffer (100 mM Phosphate, 150 mM NaCl, pH 7.4) and the modifying agent is added in a 5- to 20-fold molar excess and the reaction is carried out for 2 hrs at room temperature. Separately, the payload molecule is modified with NHS-ester/aldehyde SFB (succinimidyl 4-formylbenzoate) or C6-SFB (C6-Succinimidyl 4-formylbenzoate) under similar conditions. Both modified molecules are then desalted into conjugation buffer (100 mM phosphate, 150 mM NaCl, pH 6.0). The resulting components are mixed together using 1 mole equivalent of a limiting protein and 1.5-2 mole equivalents of a protein that can be used in abundance. A catalyst buffer of 100 mM aniline in 100 mM phosphate, 150 mM NaCl, pH 6.0 is added to adjust the final concentration of aniline to 10 mM and the reaction is carried out for 2 hrs at room temperature.

[0383] In another embodiment, the CCD-payload or XTEN-payload conjugate can be produced by reaction between an aldehyde and primary amino group followed by reduction of the formed Schiff base with sodium borohydride or cyanoborohydride. As a first step in the method, a CCD or an XTEN molecule, such as XTEN with a primary α-amino group or Lys-containing XTEN with an ε-amino group, is modified by NHS-ester/aldehyde SFB (succinimidyl 4-formylbenzoate), C6-SFB (C6-succinimidyl 4-formylbenzoate) or SFPA (succinimidyl 4-formylphenoxyacetate) using typical amine-NHS chemistry in an amine-free coupling buffer such as 0.1M sodium phosphate, 0.15M NaCl, pH 7.2. The resulting modified aldehyde-molecule can either be held at this point as an XTEN- or CCD-cross-linker composition or can be used as a reagent to create an targeted conjugate composition. To make the targeted conjugate composition, the modified aldehyde-CCD (which may also comprise a PCM and XTEN as a fusion protein) is mixed with a payload with a reactive amino-group and a mild reducing agent such as 20-100 mM sodium cyanoborohydride. The reaction mixture is incubated up to 6 hours at room temperature or overnight at 4° C. Unreacted aldehyde groups are then blocked with 50-500 mM Tris.HCl, pH 7.4 and 20-100 mM sodium cyanoborohydride, permitting separation of the conjugated purified conjugate.

[0384] In other embodiments, the invention provides conjugates comprising peptides or protein payloads wherein the payload is conjugated via chemical ligation based on the reactivity of the peptide/protein C-terminal acyl azide of the payload. As an example, when the peptide or protein is produced using solid-phase peptide synthesis (SPPS) with hydroxymethylbenzoic acid (HMBA) resin, the final peptide can be cleaved from the resin by a variety of nucleophilic reagents to give access to peptides with diverse C-terminal functionalities. In one embodiment, the method includes hydrazinolysis of the peptidyl/protein resins to yield peptide or protein hydrazides. Nitrosation of resulting acyl hydrazides with sodium nitrite or tent-butyl nitrite in dilute hydrochloric acid then results in formation of acyl azides. The resulting carbonyl azide (or acyl azide) is an activated carboxylate group (esters) that can react with a primary amine of an XTEN or a CCD to form a stable amide bond, resulting in the conjugate. In alternative embodiments, the primary amine could be the α-amine of the XTEN or CCD N-terminus or one or more a-amine of engineered lysine residues in the XTEN sequence. In the conjugation reaction, the azide function is the leaving group. The conjugation reaction with the amine groups occurs by attack of the nucleophile at the electron-deficient carbonyl group (Meienhofer, J. (1979) The Peptides: Analysis, Synthesis, Biology. Vol. 1, Academic Press: N.Y.; ten Kortenaar P. B. W. et. al. Semisynthesis of horse heart cytochrome c analogues from two or three fragments. (1985) Proc. Natl. Acad. Sci. USA 82, 8279-8283)

[0385] In another embodiment, the invention provides targeted conjugate compositions prepared by enzymatic ligation. Transglutaminases are enzymes that catalyze the formation of an isopeptide bond between the γ-carboxamide group of glutamine of a payload peptide or protein and the ε-amino group of a lysine in a lysine-engineered XTEN, thereby creating inter- or intramolecular cross-links between the XTEN and payload (see FIG. 9), resulting in the composition (Lorand L, Conrad S.M. Transglutaminases.(1984) Mol. Cell Biochem. 58(1-2), 9-35). Non-limiting examples of enzymes that have been successfully used for ligations are factor XIIIa (Schense J. C., Hubbell J. A. Cross-linking exogenous bifunctional peptides into fibrin gels with factor XIIIa. (1999) Bioconjug. Chem. 10(1):75-81) and tissue transglutaminase (Collier J. H., Messersmith P. B. Enzymatic modification of self-assembled peptide structures with tissue transglutaminase. (2003) Bioconjug. Chem. 14(4), 748-755; Davis N. E., Karfeld-Sulzer L. S., Ding S., Barron A. E. Synthesis and characterization of a new class of cationic protein polymers for multivalent display and biomaterial applications. (2009) Biomacromolecules 10 (5), 1125-1134). The glutamine substrate sequence GQQQL (SEQ ID NO: 608) is known to have high specificity toward tissue transglutaminase (Hu B. H., Messersmith P. B. Rational design of transglutaminase substrate peptides for rapid enzymatic formation of hydrogels.(2003) J. Am. Chem. Soc. 125(47), 14298-14299). Tissue transglutaminase sequence specificity was less stringent for an acyl acceptor (lysine) than for acyl donor (glutamine) (Greenberg C. S., Birckbichler P. J., Rice R. H. Transglutaminases: multifunctional cross-linking enzymes that stabilize tissues. (1991) FASEB J. 1991, 5, 3071-3077).

[0386] In an alternative embodiment of an enzymatically-created targeted conjugate composition, the sortase A transpeptidase enzyme from Staphylococcus aureus is used to catalyze the cleavage of a short 5-amino acid recognition sequence LPXTG (SEQ ID NO: 3) between the threonine and glycine residues of Protein1, and subsequently transfers the acyl-fragment to an N-terminal oligoglycine nucleophile of Protein1 (see FIG. 8). By functionalizing the Protein2 to contain the oligoglycine, it is possible to enzymatically conjugate the two proteins in a site-specific fashion to result in the desired targeted conjugate composition composition. The (poly)peptide bearing the sortase recognition site (LPXTG) (SEQ ID NO: 3) can be readily made using standard molecular biology cloning protocols. It is convenient to introduce glutamic acid in the X position of the recognition site, as this residue is commonly found in natural substrates of sortase A (Boekhorst J., de Been M. W., Kleerebezem M., Siezen R. J. Genome-wide detection and analysis of cell wall-bound proteins with LPxTG-like sorting motifs (SEQ ID NO: 3). (2005) J. Bacteriol. 187, 4928-4934). A high level of transacylation can be achieved by placing the sortase cleavage site both at the C-terminus of the substrate (Popp M. W., Antos J. M., Grotenbreg G. M., Spooner E., Ploegh H. L. Sortagging: A versatile method for protein labeling. (2007) Nat. Chem. Biol. 311,707-708) and in flexible loops (Popp M. W., Artavanis-Tsakonas K., Ploegh H. L. Substrate filtering by the active-site crossover loop in UCHL3 revealed by sortagging and gain-of-function mutations. (2009) J. Biol. Chem. 284(6), 3593-3602). For proteins labeled at the C-terminus, it is important that the glycine in the minimal LPETG tag (SEQ ID NO: 609) is not placed at the C-terminus; it must be in a peptide linkage with at least one further C-terminal amino acid. In addition, better linkage is achieved by adding an extra glycine to the C-terminus of the cleavage site to yield LPETGG (SEQ ID NO: 610) (Pritz S., Wolf Y., Kraetke O., Klose J., Bienert M., Beyermann M. Synthesis of biologically active peptide nucleic acid-peptide conjugates by sortase-mediated ligation. (2007) J. Org. Chem. 72, 3909-3912; Tanaka T., Yamamoto T., Tsukiji S., Nagamune T. Site-specific protein modification on living cells catalyzed by sortase. (2008) Chembiochem 95, 802-807). Nucleophiles compatible with sortase-mediated transpeptidation have the single structural requirement of a stretch of glycine residues with a free amino terminus. Successful transpeptidation can be achieved with nucleophiles containing anywhere from one to five glycines; however, in a preferred embodiment, a maximum reaction rate is obtained when two or three glycines are present.

[0387] While the various embodiments of conjugation chemistry have been described in terms of protein-protein conjugations, it is specifically intended that in practicing the invention, the payload moiety of the targeted conjugate compositions can be a small molecule drug in those conjugation methods applicable to functional groups like amines, sulfhydryls, carboxyl that are present in the target small molecule drugs. It will be understood by one of ordinary skill in the art that one can apply even more broad chemical techniques compared to protein and peptides whose functionalities are usually limited to amino, sulfhydryl and carboxyl groups. Drug payloads can be conjugated to the XTEN through functional groups including, but not limited to, primary amino groups, aminoxy, hydrazide, hydroxyl, thiol, thiolate, succinate (SUC), succinimidyl succinate (SS), succinimidyl propionate (SPA), succinimidyl butanoate (SBA), succinimidyl carboxymethylate (SCM), benzotriazole carbonate (BTC), N-hydroxysuccinimide (NHS), p-nitrophenyl carbonate (NPC). Other suitable reactive functional groups of drug molecule payloads include acetal, aldehydes (e.g., acetaldehyde, propionaldehyde, and butyraldehyde), aldehyde hydrate, alkenyl, acrylate, methacrylate, acrylamide, active sulfone, acid halide, isocyanate, isothiocyanate, maleimide, vinylsulfone, dithiopyridine, vinylpyridine, iodoacetamide, epoxide, glyoxal, dione, mesylate, tosylate, and tresylate.

[0388] In some embodiments of the XTEN-conjugates with drugs as the payload, the drug molecules are attached to lysine- or cysteine engineered XTEN (such as the sequences of Table 11) or the CCD of Table 6 by cross-linkers having two reactive sites for binding to the drug and the XTEN or the CCD. Preferred cross-linker groups are those that are relatively stable to hydrolysis in the circulation, are biodegradable and are nontoxic when cleaved from the conjugate. In addition, the use of cross-linkers can provide the potential for conjugates with an even greater flexibility between the drug and the CCD or XTEN, or provide sufficient space between the drug and the CCD or XTEN such that the CCD or XTEN does not interfere with the binding between the pharmacophore and its binding site. In one embodiment, a cross-linker has a reactive site that has an electrophilic group that is reactive to a nucleophilic group present on a CCD or an XTEN. Preferred nucleophiles include thiol, thiolate, and primary amine. The heteroatom of the nucleophilic group of a lysine- or cysteine-engineered XTEN or the CCD comprising cysteine is reactive to an electrophilic group on a cross-linker and forms a covalent bond to the cross-linker unit, resulting in a cross-linker conjugate. Useful electrophilic groups for cross-linkers include, but are not limited to, maleimide and haloacetamide groups, and provide a convenient site for attachment to the XTEN. In another embodiment, a cross-linker has a reactive site that has a nucleophilic group that is reactive to an electrophilic group present on a drug such that a conjugation can occur between the XTEN-cross-linker or the CCD-cross-liner and the payload drug, resulting in a conjugate. Useful electrophilic groups on a drug include, but are not limited to, hydroxyl, thiol, aldehyde, alkene, alkane, azide and ketone carbonyl groups. The heteroatom of a nucleophilic group of a cross-linker can react with an electrophilic group on a drug and form a covalent bond. Useful nucleophilic groups on a cross-linker include, but are not limited to, hydrazide, oxime, amino, hydrazine, thiosemicarbazone, hydrazine carboxylate, and arylhydrazide. The electrophilic group on a drug provides a convenient site for attachment to a cross-inker.

[0389] In a particular embodiment, the conjugation of drugs to the lysine epsilon amino group of a subject lysine-engineered XTEN makes use of a reactive drug-N-hydroxylsuccinimide reactant, or esters such as drug-succinimidyl propionate, or drug-succinimidyl butanoate or other drug-succinimide conjugates. Alternatively, lysine residues of the subject lysine-engineered XTEN may be used to introduce free sulfhydryl groups through reaction with 2-iminothiolane. Alternatively, targeting substance lysines of subject lysine-engineered XTEN may may be linked to a heterobifunctional reagent having a free hydrazide or aldehyde group available for conjugation with an active drug agent. Reactive esters can conjugate at physiological pH, but less reactive derivatives typically require higher pH values. Low temperatures may also be employed if a labile protein payload is being used. Under low temperature conditions, a longer reaction time may be used for the conjugation reaction.

[0390] In another particular embodiment, the invention provides XTEN-conjugates with an amino group conjugation with lysine residues of a subject lysine-engineered XTEN wherein the conjugation is facilitated by the difference between the pKa values of the α-amino group of the N-terminal amino acid (approximately 7.6 to 8.0) and pKa of the ε-amino group of lysine (approximately 10). Conjugation of the terminal amino group often employs reactive drug-aldehydes (such as drug-propionaldehyde or drug-butylaldehyde), which are more selective for amines and thus are less likely to react with, for example, the imidazole group of histidine. In addition, amino residues are reacted with succinic or other carboxylic acid anhydrides, or with N,N′-Disuccinimidyl carbonate (DSC), N,N′-carbonyl diimidazole (CDI), or p-nitrophenyl chloroformate to yield the activated succinimidyl carbonate, imidazole carbamate or p-nitrophenyl carbonate, respectively. Derivatization with these agents has the effect of reversing the charge of the lysinyl residues. Conjugation of a drug-aldehyde to the terminal amino group of a subject XTEN typically takes place in a suitable buffer performed at a pH which allows one to take advantage of the pKa differences between the ε-amino groups of the lysine residues and that of the α-amino group of the N-terminal residue of the protein. In the method of the embodiment, the reaction for coupling uses a pH in the range of from about pH 7 up to about 8. Useful methods for conjugation of the lysine epsilon amino group have been described in U.S. Pat. No. 4,904,584 and U.S. Pat. No. 6,048,720.

[0391] The activation method and/or conjugation chemistry to be used in the creation of the targeted conjugate compositions depends on the reactive groups of the polypeptide as well as the functional groups of the drug moiety (e.g., being amino, hydroxyl, carboxyl, aldehyde, sulfhydryl, alkene, alkane, azide, etc), the functional group of the drug-cross-linker reactant, or the functional group of the XTEN-cross-linker or the CCD-cross-linker reactant. The drug conjugation may be directed towards conjugation to all available attachment groups on the engineered XTEN polypeptide or the CCD such as the specific engineered attachment groups on the incorporated cysteine residues or lysine residues. In order to control the reactants such that the conjugation is directed to the appropriate reactive site, the invention contemplates the use of protective groups during the conjugation reaction. A “protecting group” is a moiety that prevents or blocks reaction of a particular chemically reactive functional group in a molecule under certain reaction conditions. The protecting group will vary depending upon the type of chemically reactive group being protected as well as the reaction conditions to be employed, as well as the presence of additional reactive groups in the molecule. Non-limiting examples of functional groups which may be protected include carboxylic acid groups, hydroxyl groups, amino groups, thiol groups, and carbonyl groups. Representative protecting groups for carboxylic acids and hydroxyls include esters (such as a p-methoxybenzyl ester), amides and hydrazides; for amino groups, carbamates (such as tert-butoxycarbonyl) and amides; for hydroxyl groups, ethers and esters; for thiol groups, thioethers and thioesters; for carbonyl groups, acetals and ketals; and the like. Such protecting groups are well-known to those skilled in the art and are described, for example, in T. W. Greene and G. M. Wuts, Protecting Groups in Organic Synthesis, Third Edition, Wiley, New York, 1999, and references cited therein. The conjugation may be achieved in one step or in a stepwise manner (e.g., as described in WO 99/55377), such as through addition of a reaction intermediate cross-linker, using the cross-linkers disclosed herein or those known in the art to be useful for conjugation to cysteine or lysine residues of polypeptides to be linked to reactive functional groups on drug molecules.

[0392] In some embodiments of the invention, the method for conjugating a cross-linker to a cysteine-engineered XTEN or CCD may provide that the XTEN or CCD is pre-treated with a reducing agent, such as dithiothreitol (DTT) to reduce any cysteine disulfide residues to form highly nucleophilic cysteine thiol groups (—CH₂ SH). The reducing agent is subsequently removed by any conventional method, such as by desalting. The reduced XTEN or CCD thus reacts with drug-linker compounds, or cross-linker reagents, with electrophilic functional groups such as maleimide or a-halo carbonyl, according to, for example, the conjugation method of Klussman et al. (2004) Bioconjugate Chemistry 15(4), 765-773. Conjugation of a cross-linker or a drug to a cysteine residue typically takes place in a suitable buffer at pH 6-9 at temperatures varying from 4° C. to 25° C. for periods up to about 16 hours. Alternatively, the cysteine residues can be derivatized. Suitable derivatizing agents and methods are well known in the art. For example, cysteinyl residues most commonly are reacted with α-haloacetates (and corresponding amines), such as iodoacetic acid or iodoacetamide, to give carboxymethyl or carboxyamidomethyl derivatives. Cysteinyl residues also are derivatized by reaction with bromotrifluoroacetone, α-bromo-β-(4-imidozoyl)propionic acid, chloroacetyl phosphate, N-alkylmaleimides, 3-nitro-2-pyridyl disulfide, methyl 2-pyridyl disulfide, p-chloromercuribenzoate, 2-chloromercuri-4-nitrophenol, or chloro-7-nitrobenzo-2-oxa-1,3-diazole.

[0393] In some instances, the conjugation is performed under conditions aiming at reacting as many of the available attachment groups as possible with drug or drug-linker molecules. This is achieved by means of a suitable molar excess of the drug in relation to the polypeptide. Typical molar ratios of activated drug or drug-linker molecules to polypeptide are up to about 1000-1, such as up to about 200-1 or up to about 100-1. In some cases, the ratio may be somewhat lower, however, such as up to about 50-1, 10-1 or 5-1. Equimolar ratios also may be used.

[0394] In preferred embodiments, the targeted conjugate compositions of the disclosure retain at least a portion of the pharmacologic activity compared to the corresponding payload not linked to the targeted conjugate composition. In one embodiment, the targeted conjugate composition retains at least about 1%, or at least about 5%, or at least about 10%, or at least about 20%, or at least about 30%, or at least about 40%, or at least about 50%, or at least about 60%, or at least about 70%, or at least about 80%, or at least about 90%, or at least about 95% of the pharmacologic activity of the payload not linked to the targeted conjugate composition.

[0395] In one embodiment, targeted conjugate compositions can be designed to release the payload in the body by unspecific or enzymatic hydrolysis of the linker, including disulfide bond reduction, pH-dependent release, or by exogenous or endogenous proteases, including the proteases of Table 6. Macromolecules can be taken up by the cell either through receptor-mediated endocytosis, adsorptive endocytosis or fluid phase endocytosis (Jain R.K. Transport of molecules across tumor vasculature. (1987) Cancer Metastasis Rev. 6(4), 559-593; Jain R. K. Transport of molecules, particles, and cells in solid tumors. (1999) Ann. Rev. Biomed. Eng. 1, 241-263; Mukherjee S., Ghosh R. N., Maxfield F. R. Endocytosis. (1997) Physiol. Rev. 77(3), 759-803). Upon cellular uptake of targeted conjugate composition, the payload can be released by low pH values in endosomes (pH 5.0-6.5) and lysosomes (pH 4.5-5.0), as well as by lysosomal enzymes (e.g., esterases and proteases). Example of acid-sensitive cross-linker is 6-maleimidodocaproyl hydrazone which can be coupled to thiol-bearing carriers. The hydrazone linker is rapidly cleaved at pH values <5 allowing a release of the payload in the acidic pH of endosomes and lysosomes following internalization of the conjugate (Trail P. A. et al. Effect of linker variation on the stability, potency, and efficacy of carcinoma-reactive BR64-doxorubicin immunoconjugates. (1997) Cancer Res. 57(1), 100-105; Kratz F. et al. Acute and repeat-dose toxicity studies of the (6-maleimidocaproyl)hydrazone derivative of doxorubicin (DOXO-EMCH), an albumin-binding prodrug of the anticancer agent doxorubicin. (2007) Hum. Exp. Toxicol. 26(1), 19-35). Clinically approved mAb-drug conjugate, gemtuzumab ozogamicin (Mylotarg™) is a drug-antibody conjugate containing a humanized mAb P67.6 against CD33, linked chemically to the cytotoxic antibiotic agent calicheamicin. The linker between the antibody and the drug incorporates two labile bonds: a hydrazone and a sterically hindered disulfide. It has been shown that the acid-sensitive hydrazone bond is the actual cleavage site (Jaracz S., Chen J., Kuznetsova L. V., Ojima I. Recent advances in tumor-targeting anticancer drug conjugates. (2005) Bioorg. Med. Chem. 13(17), 5043-5054).

[0396] For those targeted conjugate compositions in which the payload is linked by a disulfide bond, the payload can be released by reduction of disulfide bond within the labile linker. For example, huN901-DM1 is a tumor-activated immunotherapeutic prodrug developed by ImmunoGen, Inc. for the treatment of small cell lung cancer. The prodrug consists of humanized anti-CD56 mAb (huN901) conjugated with microtubule inhibitor maytansinoid DM1. An average of 3.5-3.9 molecules of DM1 are bound to each antibody via hindered disulfide bonds. Although the disulfide link is stable in blood, it is cleaved rapidly on entering the cell targeted by huM901, thus releasing active DM1 (Smith S. V. Technology evaluation: huN901-DM1, ImmunoGen. (2005) Curr. Opin. Mol. Ther. 7(4), 394-401). DM1 has been also coupled to Millennium Pharmaceuticals MLN-591, an anti-prostate-specific membrane antigen mAb. DM1 is linked to the antibody via a hindered disulfide bond that provides serum stability at the same time as allowing intracellular drug release on internalization (Henry M. D. et al. A prostate-specific membrane antigen-targeted monoclonal antibody-chemotherapeutic conjugate designed for the treatment of prostate cancer. (2004) Cancer Res. 64(21), 7995-8001).

[0397] Release of the payload from the targeted conjugate composition can be achieved by creating compositions using short cleavable peptides as linkers between the payload and the CCD or engineered XTEN. Example of the conjugate assessed clinically is doxorubicin-HPMA (N-(2-hydroxypropyl)methacrylamide) conjugate in which doxorubicin is linked through its amino sugar to the HPMA copolymer via a tetrapeptide spacer GlyPheLeuGly (SEQ ID NO: 611) that is cleaved by lysosomal proteases, such as cathepsin B (Vasey P. A. et al. Phase I clinical and pharmacokinetic study of PK1 [N-(2-hydroxypropyl)methacrylamide copolymer doxorubicin]: first member of a new class of chemotherapeutic agents-drug-polymer conjugates. (1999) Clin. Cancer Res. 5(1), 83-94). Other examples of carrier-drug conjugates with peptide linkers that reached clinical stage of development are macromolecular platinum complexes. Two HPMA-based drug candidates consisted of a HPMA copolymer backbone to which the complexing aminomalonate platinum complexes were bound through cathepsin B-cleavable peptide spacer GlyPheLeuGly (SEQ ID NO: 611) or tripeptide spacer GlyGlyGly (Rademaker-Lakhai J. M. et al. A Phase I and pharmacological study of the platinum polymer AP5280 given as an intravenous infusion once every 3 weeks in patients with solid tumors. (2004) Clin. Cancer Res. 10(10), 3386-3395; Sood P. et al. Synthesis and characterization of AP5346, a novel polymer-linked diaminocyclohexyl platinum chemotherapeutic agent. (2006) Bioconjugate Chem. 17(5), 1270-1279).

[0398] A highly selective method was developed to target prostate cancer via prostate-specific antigen (PSA) protease which is almost exclusively expressed in prostate tissue and prostate carcinomas. A novel albumin-binding prodrug of paclitaxel, EMC-ArgSerSerTyrTyrSerLeu-PABC-paclitaxel (SEQ ID NO: 612) (EMC: ε-maleimidocaproyl; PABC: p-aminobenzyloxycarbonyl) was synthesized. This prodrug was water soluble and was bound to endogenous and exogenous albumin. Albumin-bound form of the prodrug was cleaved by PSA releasing the paclitaxel-dipeptide Ser-Leu-PABC-paclitaxel. Due to the incorporation of a PABC self-eliminating linker, this dipeptide was rapidly degraded to liberate paclitaxel as a final cleavage product (Elsadek B. et al. Development of a novel prodrug of paclitaxel that is cleaved by prostate-specific antigen: an in vitro and in vivo evaluation study. (2010) Eur. J. Cancer 46(18), 3434-3444).

[0399] Self-immolative spacers have gained significant interest due to their utility in prodrug delivery systems. Several reports described linear self-eliminating systems or dendrimeric structures which can release all of their units through a domino-like chain fragmentation, initiated by a single cleavage event (Haba K. et al. Single-triggered trimeric prodrugs. (2005) Angew. Chem., Int. Ed. 44, 716-720; Shabat D. Self-immolative dendrimers as novel drug delivery platforms. (2006) J. Polym. Sci., Part A: Polym. Chem. 44, 1569-1578.Warnecke A., Kratz F. 2,4-Bis(hydroxymethyl)aniline as a building block for oligomers with self-eliminating and multiple release properties. (2008) J. Org. Chem. 73, 1546-1552; Sagi A. et al. Self-immolative polymers. (2008) J. Am. Chem. Soc. 130, 5434-5435). In one study, a self-immolative dendritic prodrug with four molecules of the anticancer agent camptothecin and two molecules of PEG5000 was designed and synthesized. The prodrug was effectively activated by penicillin-G-amidase under physiological conditions and free camptothecin was released to the reaction media to cause cell-growth inhibition (Gopin A. et al. Enzymatic activation of second-generation dendritic prodrugs: conjugation of self-immolative dendrimers with poly(ethylene glycol) via click chemistry. (2006) Bioconjugate Chem. 17, 1432-1440). Incorporation of a specific enzymatic substrate, cleaved by a protease that is overexpressed in tumor cells, could generate highly efficient cancer-cell-specific dendritic prodrug activation systems. Non-limiting examples of sequences that are cleavable by proteases are listed in Table 6.

[0400] In some embodiments, the invention provides targeted conjugate composition configurations, including dimeric, trimeric, tetrameric and higher order conjugates in which the payload is attached to the XTEN using a labile linker as described herein, above. In one embodiment of the foregoing, the composition further includes a targeting component to deliver the composition to a ligand or receptor on a targeted cell. In another embodiment, the invention provides conjugates in which one, two, three, or four individual conjugate compositions are conjugated with labile linkers to antibodies or antibody fragments, providing soluble compositions for use in targeted therapy of clinical indications such as, but not limited to, various treatment of tumors and other cancers wherein the antibody provides the targeting component and then, when internalized within the target cell, the labile linker permits the payload to disassociate from the composition and effect the intended activity (e.g, cytotoxicity in a tumor cell).

[0401] The unstructured characteristics and uniform composition and charge of XTEN result in properties that can be exploited for purification of targeted conjugate compositions following a conjugation reaction. Of particular utility is the capture of targeted conjugate compositions by ion exchange, which allows the removal of un-reacted payload and payload derivatives. Of particular utility is the capture of conjugates by hydrophobic interaction chromatography (HIC). Due to their hydrophilic nature, most XTEN polypeptides show low binding to HIC resins, which facilitates the capture of targeted conjugate compositions due to hydrophobic interactions between the payload and the column material, and their separation from un-conjugated composition that failed to conjugate to the payload during the conjugation process. The high purity of XTEN and targeted conjugate compositions offers a significant benefit compared to most chemical or natural polymers, particularly pegylated payloads. Most chemical and natural polymers are produced by random-or semi-random polymerization, which results in the generation of many homologs. Such polymers can be fractionated by various methods to increase fraction of the target entity in the product. However, even after enrichment most preparations of natural polymers and their payload conjugates contain less than 10% target entity. Examples of PEG conjugates with G-CSF have been described in [Bagal, D., et al. (2008) Anal Chem, 80: 2408-18]. This publication shows that even a PEG conjugate that is approved for therapeutic use contains more than 100 homologs that occur with a concentration of at least 10% of the target entity.

[0402] The complexity of random polymers, such as PEG, is a significant impediment for the monitoring and quality control during conjugation and purification. In contrast, XTEN purified by the methods described herein have high levels of purity and uniformity. In addition, the conjugates created as described herein routinely contain greater than about 80%, 90%, 91%, 92%, 93%, 94%, 95%, 96%, 97%, 98%, or 99% of the intended target and in the intended configuration, resulting in easy to interpret mass spectra and chromatograms.

[0403] 5. Targeted Conjugate Composition Configurations

[0404] It is an object of the invention to provide different configurations of the targeted conjugate compositions or configurations with multiple numbers of a given type of component in order to confer tailored properties to the resulting compositions.

[0405] In one aspect, the invention provides monomeric targeted conjugate compositions having single copies of a targeting moiety, a CCD, an XTEN, a payload (e.g. a drug or biologically active protein) conjugated to each cysteine moiety in the CCD, and optionally a PCM.

[0406] In one embodiment, the targeted conjugate composition is configured according to the structure of formula I:

[chemical structure]

wherein: i) the TM is an scFv comprising a VL and a VH sequence, wherein each VL and VH is derived from an antibody of Table 19 or has at least 90%, or 91%, or 92%, or 93%, or 94%, or 95%, or 96%, or 97%, or 98%, or 99% identity or is identical to a VL and a VH from an antibody selected from the group consisting of the VL and VH sequences set forth in Table 19, and further comprises a linker sequence selected from the group consisting of the sequences set forth in Table 20 wherein the linker is recombinantly fused between the VL and the VH; ii) the CCD is selected from the group consisting of the CCD of Table 6; iii) the XTEN has at least 90%, or 91%, or 92%, or 93%, or 94%, or 95%, or 96%, or 97%, or 98%, or 99% identity or is identical to a sequence set forth in Table 10; and iv) the drug is selected from the group consisting of doxorubicin, nemorubicin, PNU-159682, paclitaxel, docetaxel, auristatin E, auristatin F, dolastatin 10, dolastatin 15, monomethyl auristatin E (MMAE), monomethyl auristatin F (MMAF), monomethyl auristatin D (MMAD), maytansine, mertansine (DM1), maytansinoid DM4, calicheamicin, N-acetyl-calicheamicin, vinblastine, vincristine, vindesine, vinorelbine, camptothecin, topotecan, irinotecan, SN-38, duocarmycin A, duocarmycin B1, duocarmycin B2, duocarmycin C1, duocarmycin C2, duocarmycin D, duocarmycin SA, duocarmycin TM, duocarmycin MB, duocarmycin DM, mitomycin C, rachelmycin, epothilone A, epothilone B, epothilone C, tubulysin B, tubulysin M, pyrrolobenzodiazepine (PBD), bortezomib, hTNF, I1-12, ranpirnase, hTNF, IL-12, ranpirnase, human ribonuclease (RNAse), Bovine pancreatic RNase, pokeweed antiviral protein, Pseudomonas exotoxin A, gelonin, ricin-A, interferon-alpha, interferon-lambda, urease, amatoxin, alpha-amanitin, beta-amanitin, gamma-amanitin, epsilon-amanitin, bouganin, and staphylococcal enterotoxin; wherein n is equal to the number of cysteine residues of the CCD.

[0407] In another embodiment, the targeted conjugate composition is configured according to the structure of formula II:

[chemical structure]

wherein: i) the TM is an scFv comprising a VL and a VH sequence, wherein each VL and VH is derived from an antibody of Table 19 or has at least 90%, or 91%, or 92%, or 93%, or 94%, or 95%, or 96%, or 97%, or 98%, or 99% identity or is identical to a VL and a VH from an antibody selected from the group consisting of the VL and VH sequences set forth in Table 19, and further comprises a linker sequence selected from the group consisting of the sequences set forth in Table 20 wherein the linker is recombinantly fused between the VL and the VH; ii) the CCD is selected from the group consisting of the CCD of Table 6; iii) the PCM is selected from the group consisting of the sequences set forth in Table 8; iv) the XTEN has at least 90%, or 91%, or 92%, or 93%, or 94%, or 95%, or 96%, or 97%, or 98%, or 99% identity or is identical to a sequence set forth in Table 10; and v) the drug is selected from the group consisting of doxorubicin, nemorubicin, PNU-159682, paclitaxel, docetaxel, auristatin E, auristatin F, dolastatin 10, dolastatin 15, monomethyl auristatin E (MMAE), monomethyl auristatin F (MMAF), monomethyl auristatin D (MMAD), maytansine, mertansine (DM1), maytansinoid DM4, calicheamicin, N-acetyl-calicheamicin, vinblastine, vincristine, vindesine, vinorelbine, camptothecin, topotecan, irinotecan, SN-38, duocarmycin A, duocarmycin B1, duocarmycin B2, duocarmycin C1, duocarmycin C2, duocarmycin D, duocarmycin SA, duocarmycin TM, duocarmycin MB, duocarmycin DM, mitomycin C, rachelmycin, epothilone A, epothilone B, epothilone C, tubulysin B, tubulysin M, pyrrolobenzodiazepine (PBD), bortezomib, hTNF, I1-12, ranpirnase, hTNF, IL-12, ranpirnase, human ribonuclease (RNAse), Bovine pancreatic RNase, pokeweed antiviral protein, Pseudomonas exotoxin A, gelonin, ricin-A, interferon-alpha, interferon-lambda, urease, amatoxin, alpha-amanitin, beta-amanitin, gamma-amanitin, epsilon-amanitin, bouganin, and staphylococcal enterotoxin; wherein n is equal to the number of cysteine residues of the CCD.

[0408] In another embodiment, the targeted conjugate composition is configured according to the structure of formula III:

[chemical structure]

wherein: i) the TM is an scFv comprising a VL and a VH sequence, wherein each VL and VH is derived from an antibody of Table 19 or has at least 90%, or 91%, or 92%, or 93%, or 94%, or 95%, or 96%, or 97%, or 98%, or 99% identity or is identical to a VL and a VH from an antibody selected from the group consisting of the VL and VH sequences set forth in Table 19, and further comprises a linker sequence selected from the group consisting of the sequences set forth in Table 20 wherein the linker is recombinantly fused between the VL and the VH; ii) the CCD is selected from the group consisting of the CCD of Table 6; iii) the PCM is selected from the group consisting of the sequences set forth in Table 8; iv) the XTEN has at least 90%, or 91%, or 92%, or 93%, or 94%, or 95%, or 96%, or 97%, or 98%, or 99% identity or is identical to a sequence set forth in Table 10; and v) the drug is selected from the group consisting of doxorubicin, nemorubicin, PNU-159682, paclitaxel, docetaxel, auristatin E, auristatin F, dolastatin 10, dolastatin 15, monomethyl auristatin E (MMAE), monomethyl auristatin F (MMAF), monomethyl auristatin D (MMAD), maytansine, mertansine (DM1), maytansinoid DM4, calicheamicin, N-acetyl-calicheamicin, vinblastine, vincristine, vindesine, vinorelbine, camptothecin, topotecan, irinotecan, SN-38, duocarmycin A, duocarmycin B1, duocarmycin B2, duocarmycin C1, duocarmycin C2, duocarmycin D, duocarmycin SA, duocarmycin TM, duocarmycin MB, duocarmycin DM, mitomycin C, rachelmycin, epothilone A, epothilone B, epothilone C, tubulysin B, tubulysin M, pyrrolobenzodiazepine (PBD), bortezomib, hTNF, I1-12, ranpirnase, hTNF, IL-12, ranpirnase, human ribonuclease (RNAse), Bovine pancreatic RNase, pokeweed antiviral protein, Pseudomonas exotoxin A, gelonin, ricin-A, interferon-alpha, interferon-lambda, urease, amatoxin, alpha-amanitin, beta-amanitin, gamma-amanitin, epsilon-amanitin, bouganin, and staphylococcal enterotoxin; wherein n is equal to the number of cysteine residues of the CCD.

[0409] In another embodiment, the targeted conjugate composition is configured according to the structure of formula IV:

[chemical structure]

wherein: i) the TM is an scFv comprising a VL and a VH sequence, wherein each VL and VH is derived from an antibody of Table 19 or has at least 90%, or 91%, or 92%, or 93%, or 94%, or 95%, or 96%, or 97%, or 98%, or 99% identity or is identical to a VL and a VH from an antibody selected from the group consisting of the VL and VH sequences set forth in Table 19, and further comprises a linker sequence selected from the group consisting of the sequences set forth in Table 20 wherein the linker is recombinantly fused between the VL and the VH; ii) the CCD is selected from the group consisting of the CCD of Table 8; iii) the XTEN has at least 90%, or 91%, or 92%, or 93%, or 94%, or 95%, or 96%, or 97%, or 98%, or 99% identity or is identical to a sequence set forth in Table 10; and iv) the drug is selected from the group consisting of doxorubicin, nemorubicin, PNU-159682, paclitaxel, docetaxel, auristatin E, auristatin F, dolastatin 10, dolastatin 15, monomethyl auristatin E (MMAE), monomethyl auristatin F (MMAF), monomethyl auristatin D (MMAD), maytansine, mertansine (DM1), maytansinoid DM4, calicheamicin, N-acetyl-calicheamicin, vinblastine, vincristine, vindesine, vinorelbine, camptothecin, topotecan, irinotecan, SN-38, duocarmycin A, duocarmycin B1, duocarmycin B2, duocarmycin C1, duocarmycin C2, duocarmycin D, duocarmycin SA, duocarmycin TM, duocarmycin MB, duocarmycin DM, mitomycin C, rachelmycin, epothilone A, epothilone B, epothilone C, tubulysin B, tubulysin M, pyrrolobenzodiazepine (PBD), bortezomib, hTNF, I1-12, ranpirnase, hTNF, IL-12, ranpirnase, human ribonuclease (RNAse), Bovine pancreatic RNase, pokeweed antiviral protein, Pseudomonas exotoxin A, gelonin, ricin-A, interferon-alpha, interferon-lambda, urease, amatoxin, alpha-amanitin, beta-amanitin, gamma-amanitin, epsilon-amanitin, bouganin, and staphylococcal enterotoxin; wherein n is equal to the number of cysteine residues of the CCD.

[0410] In another embodiment, the targeted conjugate composition is configured according to the structure of formula V:

[chemical structure]

wherein: i) the TM1 and TM2 are different scFv, each comprising a VL and a VH sequence, wherein each VL and VH is derived from a first and a second antibody of Table 19 or wherein each has at least 90%, or 91%, or 92%, or 93%, or 94%, or 95%, or 96%, or 97%, or 98%, or 99% identity or is identical to a VL and a VH from a first and a second antibody selected from the group consisting of the VL and VH sequences set forth in Table 19, and further comprises a linker sequence selected from the group consisting of the sequences set forth in Table 20 wherein the linker is recombinantly fused between the VL and the VH and the TM1 and TM2 are recombinantly fused together by a short linker of hydrophilic amino acids selected from the group consisting of the sequences SGGGGS (SEQ ID NO: 1), GGGGS (SEQ ID NO: 2), GGS, and GSP; ii) the CCD is selected from the group consisting of the CCD of Table 6; iii) the XTEN has at least 90%, or 91%, or 92%, or 93%, or 94%, or 95%, or 96%, or 97%, or 98%, or 99% identity or is identical to a sequence set forth in Table 10; and iv) the drug is selected from the group consisting of doxorubicin, nemorubicin, PNU-159682, paclitaxel, docetaxel, auristatin E, auristatin F, dolastatin 10, dolastatin 15, monomethyl auristatin E (MMAE), monomethyl auristatin F (MMAF), monomethyl auristatin D (MMAD), maytansine, mertansine (DM1), maytansinoid DM4, calicheamicin, N-acetyl-calicheamicin, vinblastine, vincristine, vindesine, vinorelbine, camptothecin, topotecan, irinotecan, SN-38, duocarmycin A, duocarmycin B1, duocarmycin B2, duocarmycin C1, duocarmycin C2, duocarmycin D, duocarmycin SA, duocarmycin TM, duocarmycin MB, duocarmycin DM, mitomycin C, rachelmycin, epothilone A, epothilone B, epothilone C, tubulysin B, tubulysin M, pyrrolobenzodiazepine (PBD), bortezomib, hTNF, I1-12, ranpirnase, hTNF, IL-12, ranpirnase, human ribonuclease (RNAse), Bovine pancreatic RNase, pokeweed antiviral protein, Pseudomonas exotoxin A, gelonin, ricin-A, interferon-alpha, interferon-lambda, urease, amatoxin, alpha-amanitin, beta-amanitin, gamma-amanitin, epsilon-amanitin, bouganin, and staphylococcal enterotoxin; wherein n is equal to the number of cysteine residues of the CCD.

[0411] In another embodiment, the targeted conjugate composition is configured according to the structure of formula VI:

[chemical structure]

[0412] wherein: i) the TM1 and TM2 are different scFv, each comprising a VL and a VH sequence, wherein each VL and VH is derived from a first and a second antibody of Table 19 or wherein each has at least 90%, or 91%, or 92%, or 93%, or 94%, or 95%, or 96%, or 97%, or 98%, or 99% identity or is identical to a VL and a VH from a first and a second antibody selected from the group consisting of the VL and VH sequences set forth in Table 19, and further comprises a linker sequence selected from the group consisting of the sequences set forth in Table 20 wherein the linker is recombinantly fused between the VL and the VH and the TM1 and TM2 are recombinantly fused together by a short linker of hydrophilic amino acids selected from the group consisting of the sequences SGGGGS (SEQ ID NO: 1), GGGGS (SEQ ID NO: 2), GGS, and GSP; ii) the CCD is selected from the group consisting of the CCD of Table 6; iii) the PCM is selected from the group consisting of the sequences set forth in Table 8; iv) the XTEN has at least 90%, or 91%, or 92%, or 93%, or 94%, or 95%, or 96%, or 97%, or 98%, or 99% identity or is identical to a sequence set forth in Table 10; and iv) the drug is selected from the group consisting of doxorubicin, nemorubicin, PNU-159682, paclitaxel, docetaxel, auristatin E, auristatin F, dolastatin 10, dolastatin 15, monomethyl auristatin E (MMAE), monomethyl auristatin F (MMAF), monomethyl auristatin D (MMAD), maytansine, mertansine (DM1), maytansinoid DM4, calicheamicin, N-acetyl-calicheamicin, vinblastine, vincristine, vindesine, vinorelbine, camptothecin, topotecan, irinotecan, SN-38, duocarmycin A, duocarmycin B1, duocarmycin B2, duocarmycin C1, duocarmycin C2, duocarmycin D, duocarmycin SA, duocarmycin TM, duocarmycin MB, duocarmycin DM, mitomycin C, rachelmycin, epothilone A, epothilone B, epothilone C, tubulysin B, tubulysin M, pyrrolobenzodiazepine (PBD), bortezomib, hTNF, I1-12, ranpirnase, hTNF, IL-12, ranpirnase, human ribonuclease (RNAse), Bovine pancreatic RNase, pokeweed antiviral protein, Pseudomonas exotoxin A, gelonin, ricin-A, interferon-alpha, interferon-lambda, urease, amatoxin, alpha-amanitin, beta-amanitin, gamma-amanitin, epsilon-amanitin, bouganin, and staphylococcal enterotoxin; wherein n is equal to the number of cysteine residues of the CCD.

[0413] In another embodiment, the targeted conjugate composition is configured according to the structure of formula VII:

[chemical structure]

wherein: i) the TM is an scFv comprising a VL and a VH sequence, wherein each VL and VH is derived from an antibody of Table 19 or has at least 90%, or 91%, or 92%, or 93%, or 94%, or 95%, or 96%, or 97%, or 98%, or 99% identity or is identical to a VL and a VH from an antibody selected from the group consisting of the VL and VH sequences set forth in Table 19, and further comprises a linker sequence selected from the group consisting of the sequences set forth in Table 20 wherein the linker is recombinantly fused between the VL and the VH; ii) the CCD is selected from the group consisting of the CCD of Table 6; iii) the PCM is selected from the group consisting of the sequences set forth in Table 8; iv) the XTEN has at least 90%, or 91%, or 92%, or 93%, or 94%, or 95%, or 96%, or 97%, or 98%, or 99% identity or is identical to a sequence set forth in Table 10; and v) the drug is selected from the group consisting of doxorubicin, nemorubicin, PNU-159682, paclitaxel, docetaxel, auristatin E, auristatin F, dolastatin 10, dolastatin 15, monomethyl auristatin E (MMAE), monomethyl auristatin F (MMAF), monomethyl auristatin D (MMAD), maytansine, mertansine (DM1), maytansinoid DM4, calicheamicin, N-acetyl-calicheamicin, vinblastine, vincristine, vindesine, vinorelbine, camptothecin, topotecan, irinotecan, SN-38, duocarmycin A, duocarmycin B1, duocarmycin B2, duocarmycin C1, duocarmycin C2, duocarmycin D, duocarmycin SA, duocarmycin TM, duocarmycin MB, duocarmycin DM, mitomycin C, rachelmycin, epothilone A, epothilone B, epothilone C, tubulysin B, tubulysin M, pyrrolobenzodiazepine (PBD), bortezomib, hTNF, I1-12, ranpirnase, hTNF, IL-12, ranpirnase, human ribonuclease (RNAse), Bovine pancreatic RNase, pokeweed antiviral protein, Pseudomonas exotoxin A, gelonin, ricin-A, interferon-alpha, interferon-lambda, urease, amatoxin, alpha-amanitin, beta-amanitin, gamma-amanitin, epsilon-amanitin, bouganin, and staphylococcal enterotoxin; wherein n is equal to the number of cysteine residues of the CCD.

[0414] 6. Multimeric Configurations of Compositions

[0415] In one aspect, the invention provides targeted conjugate compositions wherein different numbers of XTEN partners are joined by linkers in a numerically-defined configuration; e.g., dimeric, trimeric, tetrameric, or multimeric. As used herein, “precursor” is intended to include components used as reactants in a conjugation reaction leading to an intermediate or fmal composition, and includes but is not limited to XTEN segments of any length (including the XTEN of Tables 10 and 11), XTEN-crosslinkers, XTEN-payload-crosslinker segments, CCD-cross-linkers, CCD-payloads, CCD-XTEN-crosslinkers, payloads with reactive groups, linkers, and other such components described herein.

[0416] In some embodiments, the invention provides conjugates in which two XTEN precursor segments are linked by a divalent cross-linker, resulting in a divalent configuration, such as shown in FIGS. 15-17. In one embodiment of the divalent XTEN-conjugate, each XTEN-conjugate can be a monomeric fusion protein further comprising a targeting moiety, a CCD, a PCM, and a biologically active peptide or polypeptide, wherein each fusion protein precursor segment is linked to the divalent linker by the alpha-amino group of the N-terminus, resulting in the divalent conjugate. In another embodiment of the divalent XTEN-conjugate, each XTEN precursor segment is a monomeric fusion protein comprising a targeting moiety, a CCD, a PCM, and a biologically active peptide or polypeptide, wherein each fusion protein is linked to the divalent linker at the C-terminus, resulting in the divalent conjugate. In another embodiment of the divalent XTEN-conjugate, each conjugate comprises one or more payloads (that can be a peptide, polypeptide or a drug) conjugated to the CCD, a CCD-XTEN fusion, or to the XTEN, wherein each precursor is linked to the other precursor comprising one or more second, different payload molecules by a divalent linker at the N-terminus, resulting in the divalent conjugate. In the foregoing embodiments of the paragraph, different approaches may be used to create the precurors to be linked, such as conjugating a linker to a first precuror XTEN and then effecting a second reaction to join the precursor to the reactive group of the terminus of the second XTEN or CCD-XTEN precursor. Alternatively, one or both of the XTEN or CCD-XTEN termini can be modified as precurors that can then be joined by click chemistry or by other methods described or illustrated herein, leaving few or no residual atoms to bridge the intersection of the resulting conjugate. In another embodiment, two CCD-XTEN or XTEN precuror sequences are linked by a disulfide bridge using cysteines or thiol groups introduced at or near the termini of the precursor XTEN reactants, resulting in a divalent XTEN-conjugate. Using such methods, various configurations can be constructed. Exemplary configurations of such divalent conjugates follow.

[0417] In one embodiment, the invention provides a targeted conjugate composition having the structure of formula VIII

[chemical structure]

wherein independently for each occurrence the TM is an scFv comprising a VL and a VH sequence, wherein each VL and VH is derived from an antibody of Table 19 or has at least 90%, or 91%, or 92%, or 93%, or 94%, or 95%, or 96%, or 97%, or 98%, or 99% identity or is identical to a VL and a VH from an antibody selected from the group consisting of the VL and VH sequences set forth in Table 19, and further comprises a linker sequence selected from the group consisting of the sequences set forth in Table 20 wherein the linker is recombinantly fused between the VL and the VH; the CCD is selected from the group consisting of the CCD of Table 6; the PCM is selected from the group consisting of the sequences set forth in Table 8; iv) the XTEN has at least 90%, or 91%, or 92%, or 93%, or 94%, or 95%, or 96%, or 97%, or 98%, or 99% identity or is identical to a sequence set forth in Table 10; CL is a trimeric cross-linker selected from Table 24, each XTEN is identical wherein the XTEN has at least 90%, or 91%, or 92%, or 93%, or 94%, or 95%, or 96%, or 97%, or 98%, or 99% identity or is identical to a sequence set forth in Table 10; and the drug is selected from the group consisting of doxorubicin, nemorubicin, PNU-159682, paclitaxel, docetaxel, auristatin E, auristatin F, dolastatin 10, dolastatin 15, monomethyl auristatin E (MMAE), monomethyl auristatin F (MMAF), monomethyl auristatin D (MMAD), maytansine, mertansine (DM1), maytansinoid DM4, calicheamicin, N-acetyl-calicheamicin, vinblastine, vincristine, vindesine, vinorelbine, camptothecin, topotecan, irinotecan, SN-38, duocarmycin A, duocarmycin B1, duocarmycin B2, duocarmycin C1, duocarmycin C2, duocarmycin D, duocarmycin SA, duocarmycin TM, duocarmycin MB, duocarmycin DM, mitomycin C, rachelmycin, epothilone A, epothilone B, epothilone C, tubulysin B, tubulysin M, pyrrolobenzodiazepine (PBD), bortezomib, hTNF, I1-12, ranpirnase, hTNF, IL-12, ranpirnase, human ribonuclease (RNAse), Bovine pancreatic RNase, pokeweed antiviral protein, Pseudomonas exotoxin A, gelonin, ricin-A, interferon-alpha, interferon-lambda, urease, amatoxin, alpha-amanitin, beta-amanitin, gamma-amanitin, epsilon-amanitin, bouganin, and staphylococcal enterotoxin; wherein n is equal to the number of cysteine residues of the CCD. In the foregoing embodiment, the XTEN can be linked to the fusion protein using a trimeric cross-linker including, but not limited to the cross-linkers of Table 24.

[0418] The invention further provides XTEN-linker and XTEN-linker payload conjugates with a tetrameric configuration. In one embodiment, the invention provides conjugates in which three XTEN sequences are linked by a tetraravalent linker, resulting in a tetrarameric configuration. In one embodiment, the invention provides a targeted conjugate composition having the structure of formula IX

[chemical structure]

wherein independently for each occurrence the TM is an scFv comprising a VL and a VH sequence, wherein each VL and VH is derived from an antibody of Table 19 or has at least 90%, or 91%, or 92%, or 93%, or 94%, or 95%, or 96%, or 97%, or 98%, or 99% identity or is identical to a VL and a VH from an antibody selected from the group consisting of the VL and VH sequences set forth in Table 19, and further comprises a linker sequence selected from the group consisting of the sequences set forth in Table 20 wherein the linker is recombinantly fused between the VL and the VH; the CCD is selected from the group consisting of the CCD of Table 6; the PCM is selected from the group consisting of the sequences set forth in Table 8; iv) the XTEN has at least 90%, or 91%, or 92%, or 93%, or 94%, or 95%, or 96%, or 97%, or 98%, or 99% identity or is identical to a sequence set forth in Table 10; CL is a tetravalent cross-linker; each XTEN is identical wherein the XTEN has at least 90%, or 91%, or 92%, or 93%, or 94%, or 95%, or 96%, or 97%, or 98%, or 99% identity or is identical to a sequence set forth in Table 10; and the drug is selected from the group consisting of doxorubicin, nemorubicin, PNU-159682, paclitaxel, docetaxel, auristatin E, auristatin F, dolastatin 10, dolastatin 15, monomethyl auristatin E (MMAE), monomethyl auristatin F (MMAF), monomethyl auristatin D (MMAD), maytansine, mertansine (DM1), maytansinoid DM4, calicheamicin, N-acetyl-calicheamicin, vinblastine, vincristine, vindesine, vinorelbine, camptothecin, topotecan, irinotecan, SN-38, duocarmycin A, duocarmycin B1, duocarmycin B2, duocarmycin C1, duocarmycin C2, duocarmycin D, duocarmycin SA, duocarmycin TM, duocarmycin MB, duocarmycin DM, mitomycin C, rachelmycin, epothilone A, epothilone B, epothilone C, tubulysin B, tubulysin M, pyrrolobenzodiazepine (PBD), bortezomib, hTNF, I1-12, ranpirnase, hTNF, IL-12, ranpirnase, human ribonuclease (RNAse), Bovine pancreatic RNase, pokeweed antiviral protein, Pseudomonas exotoxin A, gelonin, ricin-A, interferon-alpha, interferon-lambda, urease, amatoxin, alpha-amanitin, beta-amanitin, gamma-amanitin, epsilon-amanitin, bouganin, and staphylococcal enterotoxin; wherein n is equal to the number of cysteine residues of the CCD. Non-limiting examples of tetravalent linkers include a tetraravalent-thiol, a quadravalent-N-maleimide linker such as described in U.S. Pat. No. 7,524,821.

[0419] In another embodiment, the invention provides a targeted conjugate composition having the structure of formula X

[chemical structure]

wherein independently for each occurrence the TM1 is a first scFv comprising a VL and a VH sequence, wherein each VL and VH is derived from an antibody of Table 19 or has at least 90%, or 91%, or 92%, or 93%, or 94%, or 95%, or 96%, or 97%, or 98%, or 99% identity or is identical to a VL and a VH from an antibody selected from the group consisting of the VL and VH sequences set forth in Table 19, and further comprises a linker sequence selected from the group consisting of the sequences set forth in Table 20 wherein the linker is recombinantly fused between the VL and the VH; the TM2 is a second scFv, different from the first scFv, wherein the TM2 comprises a VL and a VH sequence, wherein each VL and VH is derived from an antibody of Table 19 or has at least 90%, or 91%, or 92%, or 93%, or 94%, or 95%, or 96%, or 97%, or 98%, or 99% identity or is identical to a VL and a VH from an antibody selected from the group consisting of the VL and VH sequences set forth in Table 19, and further comprises a linker sequence selected from the group consisting of the sequences of Table 20 wherein the linker is recombinantly fused between the VL and the VH; the CCD is selected from the group consisting of the CCD of Table 6; the PCM is selected from the group consisting of the PCM of Table 8; the XTEN is a cysteine-engineered XTEN having at least 90%, or 91%, or 92%, or 93%, or 94%, or 95%, or 96%, or 97%, or 98%, or 99% identity or is identical to a sequence set forth in Table 11; the drug is selected from the group consisting of doxorubicin, nemorubicin, PNU-159682, paclitaxel, docetaxel, auristatin E, auristatin F, dolastatin 10, dolastatin 15, monomethyl auristatin E (MMAE), monomethyl auristatin F (MMAF), monomethyl auristatin D (MMAD), maytansine, mertansine (DM1), maytansinoid DM4, calicheamicin, N-acetyl-calicheamicin, vinblastine, vincristine, vindesine, vinorelbine, camptothecin, topotecan, irinotecan, SN-38, duocarmycin A, duocarmycin B1, duocarmycin B2, duocarmycin C1, duocarmycin C2, duocarmycin D, duocarmycin SA, duocarmycin TM, duocarmycin MB, duocarmycin DM, mitomycin C, rachelmycin, epothilone A, epothilone B, epothilone C, tubulysin B, tubulysin M, pyrrolobenzodiazepine (PBD), bortezomib, hTNF, I1-12, ranpirnase, hTNF, IL-12, ranpirnase, human ribonuclease (RNAse), Bovine pancreatic RNase, pokeweed antiviral protein, Pseudomonas exotoxin A, gelonin, ricin-A, interferon-alpha, interferon-lambda, urease, amatoxin, alpha-amanitin, beta-amanitin, gamma-amanitin, epsilon-amanitin, bouganin, and staphylococcal enterotoxin; wherein n is equal to the number of cysteine residues of the CCD; and y is an integer between 3 and 10, inclusive, equal to the number of cysteine residues of the XTEN.

[0420] It is specifically contemplated that each the scFv of the TM of the embodiments of formulae I-X have VL and VH that can be configured, from the N-terminus to the C-terminus, as VH-linker-VL or VL-linker-VH and that the TM1 and TM2 of the embodiments of formula V and formula VI can each independently be configured as VH-linker-VL or VL-linker-VH.

[0421] 7. Multivalent Configurations with Four or More XTEN

[0422] Using XTEN of Table 11, compositions are contemplated containing three or more XTEN-conjugate molecules linked to the cysteine-engineered backbone, in which fusion proteins of PCM, TM, and CCD (with linked payload drugs) are conjugated to the cysteine residues of the XTEN resulting in a “comb” multivalent configuration. In one embodiment, the multivalent configuration conjugate composition is created by reacting the N-terminus of the PCM of the foregoing fusion protein to the cysteine-engineered XTEN with a linker appropriate for reaction with the cysteine-engineered XTEN, resulting in the final product. In the embodiments, the valency of the final product is controlled by the number of reactive cysteine groups incorporated into the XTEN. Additionally, it is contemplated that the fmal product can be designed to locate a second targeting moiety on the N- or C-terminus of the XTEN, which improves interactions with its ligand on the target cell. Representative schematic examples of such comb configurations are shown in FIGS. 37 and 39.

[0423] 8. Bispecific Payload Configurations on Monomer XTEN Backbone

[0424] In another aspect, the invention provides XTEN-conjugates containing two different payload molecules linked to a single cysteine-engineered XTEN backbone, resulting in a bivalent conjugate. In one embodiment, the bivalent configuration conjugate is created by reacting the engineered XTEN, such as those specifically provided in Table 11, with a first targeted conjugate composition with one or more molecules of a first attached payload drug with a cross-linker appropriate for reaction with the cysteine-engineered XTEN, followed by a second reaction with a second targeted conjugate composition with one or more molecules of a second, different attached payload drug with a cross-linker appropriate for reaction with the lysine-engineered XTEN, resulting in the final product. The number and location of linked targeted conjugate compositions is controlled by the design of the engineered XTEN, with the placement of the reactive thiol or amino group being determinative. In one embodiment, the bivalent conjugate comprises a single molecule of a first targeted conjugate compositions with one or molecules of a first payload and a single molecule of a second targeted conjugate compositions with one or more molecules of a second payload linked to the respective cysteine and lysine residues of the engineered XTEN. In another embodiment, the bivalent conjugate comprises one, or two, or three, or more molecules of a first targeted conjugate compositions with one or molecules of a first payload linked to cysteine residues of the cysteine-lysine-engineered XTEN and a single molecule of a second targeted conjugate compositions with one or molecules of a second payload linked to a single lysine of the cysteine-lysine-engineered XTEN. In another embodiment, the bivalent conjugate comprises one, or two, or three, or four, or five molecules of a first payload and one, or two, or three, or four, or five molecules of a second payload linked to the cysteine-lysine-engineered XTEN by linkers.

[0425] In another embodiment, the bivalent configuration conjugate is created by reacting the cysteine- and lysine-engineered XTEN, such as those of Table 11, with a first linker appropriate for reaction with the cysteine-engineered XTEN, followed by a second reaction with a linker appropriate for reaction with the lysine-engineered XTEN, then reacting the XTEN-crosslinker backbone with a first payload with a thiol reactive group capable of reacting with the first linker, followed by a reaction of a second payload with an amino group capable of reacting with the second cross-linker, resulting in the final product.

[0426] 9. Libraries of XTEN-Payload Configurations

[0427] In another aspect, the invention provides libraries of XTEN-payload conjugate precursors, methods to make the libraries, and methods to combine the library precursors in a combinatorial approach, as illustrated in FIGS. 15-16, to achieve optimal combinations of, as well as the optimal ratio of payloads. In one embodiment, the invention provides a library of individual XTEN each linked to 1, or 2, or 3, or 4, or 5, or 6, or 7, or 8, or 9, or 10 or more or more molecules of a given payload, including those described herein, to create the library of XTEN-payload precursors. In the method, a series of XTEN-payload precursors to be linked are further conjugated to a linker, and then is subsequently mixed and reacted with the other XTEN-payload precursors capable of reacting with the linker under conditions to effect the conjugation, resulting in a library of the various permutations and ratios of payloads linked to XTEN in configurations described herein. Such a library is then screened in an in vitro or in vivo assay suitable to assess a parameter in a given clinical indication (e.g., cancer, metabolic disorder, diabetes) in order to determine those compositions providing the optimal response or action. In one exemplary embodiment, one category of precursor includes various targeting moieties, such as antibody fragments or scFv (e.g., of or derived from the antibodies of Table 19) with binding affinity to a tumor-associated antigens or ligands of Table 2, Table 3, Table 4, Table 18, or Table 19, and the second category of precursor is one or more payloads, such as a cytotoxic drug or a payload chosen from Tables 14-17. Each category of precursor to be linked is further conjugated to a linker, and, as illustrated in FIG. 17, is subsequently mixed and reacted with the other XTEN-payload precursors capable of reacting with the linker under conditions to effect the conjugation, resulting in a library of the various targeting moieties and drug permutations in varying ratios to each other. The XTEN-conjugates are designed to permit fixed ratios of one payload to another; e.g., is 1:1, or 1:1.5, or 1:2, or 1:3, or 2:3, or 1:4, or 1:5 or 1:9 in the case of two different payloads. Similar ranges of ratios would be applied for library conjugates comprising 3, 4, 5 or more payloads. In one embodiment of the foregoing, and as illustrated in FIG. 37, the conjugates further comprise one or more peptidyl cleavage moieties (PCM) between the XTEN backbone and the XTEN-payload component wherein the PCM is a substrate for a protease associated with the target tissue that is the ligand of the targeting moiety wherein the binding of the targeting moiety to the ligand brings the conjugate into proximity to the protease, resulting in the release of the XTEN-payload component and enhanced killing or an enhanced biological effect on the target tissue compared to a composition lacking in said PCM and targeting moiety. In such cases, the released payload may act directly at the surface of the tissue or may be internalized and further degraded, resulting in release of the payload, such as the cytotoxic drugs described herein.

### VII). Dosage Forms and Pharmaceutical Compositions

[0428] The present invention provides pharmaceutical compositions comprising targeted conjugate compositions of the disclosure. In one embodiment, the pharmaceutical composition comprises an targeted conjugate composition selected from the various embodiments described herein, and at least one pharmaceutically acceptable carrier.

[0429] In another aspect, the present invention provides bolus doses or dosage forms comprising a targeted conjugate composition described herein. In one embodiment, the bolus dose or dosage of a targeted conjugate composition comprises a therapeutically effective bodyweight adjusted bolus dose for a human patient.

[0430] In other embodiments, the bolus dose or dosage is (i) for use in treating cancer in a subject in need; and/or (ii) formulated for subcutaneous administration. In one embodiment, the bolus dose or dosage form is a pharmaceutical composition comprising a targeted conjugate composition of any of the embodiments disclosed herein and a pharmaceutically acceptable carrier.

[0431] In another embodiment, the invention provides kits, comprising packaging material and at least a first container comprising the pharmaceutical composition of the foregoing embodiment and a label identifying the pharmaceutical composition and storage and handling conditions, and optionally a sheet of instructions for the preparation and/or administration of the pharmaceutical compositions to a subject.

[0432] The invention provides a method of preparing a pharmaceutical composition, comprising the step of combining a subject targeted conjugate composition of the embodiments with at least one pharmaceutically acceptable carrier into a pharmaceutically acceptable formulation. The targeted conjugate compositions of the present invention can be formulated according to known methods to prepare pharmaceutically useful compositions, whereby the targeted conjugate composition is combined in admixture with a pharmaceutically acceptable carrier vehicle, such as aqueous solutions or buffers, pharmaceutically acceptable suspensions and emulsions. Examples of non-aqueous solvents include propyl ethylene glycol, polyethylene glycol and vegetable oils. Therapeutic formulations are prepared for storage by mixing the active ingredient having the desired degree of purity with optional physiologically acceptable carriers, excipients or stabilizers, as described in Remington's Pharmaceutical Sciences 16th edition, Osol, A. Ed. (1980), in the form of lyophilized formulations or aqueous solutions. The pharmaceutical compositions can be administered by any suitable means or route, including subcutaneously, subcutaneously by infusion pump, intramuscularly, and intravenously. It will be appreciated that the preferred route will vary with the disease and age of the recipient, and the severity of the condition being treated. Osmotic pumps may be used as slow release agents in the form of tablets, pills, capsules or implantable devices. Syringe pumps may also be used as slow release agents. Such devices are described in U.S. Pat. Nos. 4,976,696; 4,933,185; 5,017,378; 6,309,370; 6,254,573; 4,435,173; 4,398,908; 6,572,585; 5,298,022; 5,176,502; 5,492,534; 5,318,540; and 4,988,337, the contents of which are incorporated herein by reference. One skilled in the art, considering both the disclosure of this invention and the disclosures of these other patents could produce a syringe pump for the extended release of the compositions of the present invention.

[0433] In another embodiment, the invention provides an targeted conjugate composition of any of the embodiments described herein for use in making a medicament useful for the treatment of a condition including, but not limited a cancer or an inflammatory condition.

### VIII). Methods of Treatment

[0434] The invention provides a method of treating a disease in a subject, comprising administering to the subject a therapeutically effective effective amount of the targeted conjugate composition of any of the foregoing embodiments to a subject in need thereof. In one embodiment, the targeted conjugate composition of the method comprises a single type of payload selected from Tables 14-17. In another embodiment, the method comprises administering to the subject a therapeutically effective effective amount of a targeted conjugate composition selected from the group consisting of the constructs set forth in Table 5. In another embodiment, the method comprises administering to the subject a therapeutically effective effective amount of a targeted conjugate composition selected from the group consisting of the constructs set forth in the Examples.

[0435] In other embodiments, the method comprises administering to a human patient with cancer at least two therapeutically effective bodyweight adjusted bolus doses of a targeted conjugate composition of any of the embodiments disclosed herein. In one embodiment of the foregoing, the method comprises administering to a human patient with cancer at least two therapeutically effective bodyweight adjusted bolus doses of a targeted conjugate composition selected from the group consisting of the constructs set forth in Table 5, wherein said administration of said bolus doses is separated by at least about 7 days, at least about 10 days, at least about 14 days, at least about 21 days, at least about 28 days, or at least about monthly.

[0436] In another embodiment, the method comprises administering to a human patient with cancer at least two therapeutically effective bodyweight adjusted bolus doses of a targeted conjugate composition selected from the group consisting of the constructs set forth in Table 5, wherein said therapeutically effective bodyweight adjusted bolus dose is selected from the group consisting of at least about 0.05 mg/kg, at least about 0.1 mg/kg, at least about 0.2 mg/kg, at least about 0.4 mg/kg, at least about 0.8 mg/kg, at least about 1.0 mg/kg, at least about 1.2 mg/kg, at least about 1.4 mg/kg, at least about 1.6 mg/kg, at least about 1.8 mg/kg, at least about 2.0 mg/kg, at least about 2.2 mg/kg, at least about 2.4 mg/kg, at least about 2.6 mg/kg, at least about 2.7 mg/kg, at least about 2.8 mg/kg, at least 3.0 mg/kg, at least 4.0 mg/kg, at least about 5.0 mg/kg, at least about 6.0 mg/kg, at least about 7.0 mg/kg, at least about 10 mg/kg, or at least about 15 mg/kg.

[0437] In the methods of treatment, the payload of the targeted conjugate composition is one that is known in the art to have a beneficial effect when administered to a subject with a particular disease or condition. In one embodiment, the payload(s) of the composition mediate their therapeutic effect via a cytoxic effect on a cell of a target tissue. In the foregoing embodiments of the paragraph, the method is useful in treating or ameliorating or preventing a disease selected from cancer, cancer supportive care, or inflammation, autoimmune disease, infectious diseases, metabolic disease, musculoskeletal disease, nephrology disorders, ophthalmologic diseases, pain, and respiratory diseases associated with inflammation. With greater particularity, the cancer is selected from breast cancer, ER/PR+ breast cancer, Her2+ breast cancer, triple-negative breast cancer, liver carcinoma, lung cancer, non-small cell lung cancer, mesothelioma, colorectal cancer, esophageal carcinoma, fibrosarcoma, choriocarcinoma, ovarian cancer, cervical carcinoma, laryngeal carcinoma, endometrial carcinoma, hepatocarcinoma, gastric cancer, prostate cancer, renal cell carcinoma, adenocarcinoma, Kaposi's sarcoma, astrocytoma, melanoma, squamous cell cancer, basal cell carcinoma, head and neck cancer, thyroid carcinoma, Wilm's tumor, urinary tract carcinoma, thecoma, arrhenoblastoma, glioblastomoa, and pancreatic cancer, leukemia, acute myeloid leukemia (AML), chronic myeloid leukemia (PCML), acute lymphocytic leukemia (ALL), chronic lymphocytic leukemia (CLL), T-cell acute lymphoblastic leukemia, lymphoblastic disease, multiple myeloma, Hodgkin's lymphoma, and non-Hodgkin's lymphoma.

[0438] In some embodiments of the method of treatment, the targeted conjugate composition can be administered subcutaneously, intramuscularly, or intravenously. In one embodiment, the composition is administered using a therapeutically effective amount. In one embodiment, administration of two or more consecutive doses of the therapeutically effective amount results in a gain in time spent within a therapeutic window for the composition compared to the payload not linked to the targeted conjugate composition and administered using comparable doses to a subject. The gain in time spent within the therapeutic window can be at least three-fold longer than unmodified payload, or alternatively, at least four-fold, or five-fold, or six-fold, or seven-fold, or eight-fold, or nine-fold, or at least 10-fold, or at least 20-fold, or at least about 30-fold, or at least about 50-fold, or at least about 100-fold longer than the corresponding payload or payloads not linked to XTEN.

[0439] In one embodiment of the method of treatment, a smaller moles/kg amount of at least about two-fold less, or at least about three-fold less, or at least about four-fold less, or at least about five-fold less, or at least about six-fold less, or at least about eight-fold less, or at least about 10-fold less of the targeted conjugate composition or a pharmaceutical composition comprising the targeted conjugate composition is administered to a subject in need thereof in comparison to the corresponding payload(s) not linked to the targeted conjugate composition under a dose regimen needed to maintain a therapeutic effect. In some embodiments of the method, the therapeutic effect is a measured parameter, clinical symptom or endpoint known in the art to be associated with the underlying condition of the subject to be treated or prevented such as, but not limited to, presence or concentration of a cancer marker, size of a tumor, tumor stasis, numbers of tumors, tumor necrosis, body weight, cytokine levels, blood parameters, pain, time-to-progression of the cancer, time-to-relapse, time-to-discovery of local recurrence, time-to-discovery of regional metastasis, time-to-discovery of distant metastasis, time-to-onset of symptoms, hospitalization, time-to-increase in pain medication requirement, time-to-requirement of salvage chemotherapy, time-to-requirement of salvage surgery, time-to-requirement of salvage radiotherapy, time-to-treatment failure, and time of survival. In the foregoing embodiment, the time required to maintain the therapeutic effect is at least about 21 days, or at least about 30 days, or at least about one month, at least about 45 days, at least about 60 days, at least about 90 days, or at least about 120 days.

[0440] In another embodiment of the method of treatment, a smaller moles/kg amount of at least about two-fold less, or at least about three-fold less, or at least about four-fold less, or at least about five-fold less, or at least about six-fold less, or at least about eight-fold less, or at least about 10-fold less of the targeted conjugate composition or a pharmaceutical composition comprising the targeted conjugate composition is administered to a subject in need thereof in comparison to the corresponding payload(s) not linked to the targeted conjugate composition under a dose regimen needed to maintain a comparable area under the curve as the corresponding moles/kg amount of the payload(s) not linked to the targeted conjugate composition needed to maintain a therapeutic effect. In another embodiment, the targeted conjugate composition or a pharmaceutical composition comprising the conjugate requires less frequent administration for routine treatment of a subject, wherein the dose of targeted conjugate composition or pharmaceutical composition is administered about every four days, about every seven days, about every 10 days, about every 14 days, about every 21 days, or about monthly to the subject, and the targeted conjugate composition achieves a comparable area under the curve as the corresponding payload(s) not linked to the targeted conjugate composition and administered to the subject. In yet other embodiments, an accumulatively smaller amount of about 5%, or about 10%, or about 20%, or about 40%, or about 50%, or about 60%, or about 70%, or about 80%, or about 90% less of moles/kg of the targeted conjugate composition is administered to a subject in comparison to the corresponding amount of the payload(s) not linked to the targeted conjugate composition under a dose regimen needed to maintain an effective blood concentration, yet the conjugate achieves at least a comparable area under the curve as the corresponding payload(s) not linked to the targeted conjugate composition. The accumulatively smaller amount is measure for a period of at least about one week, or at least about 14 days, or at least about 21 days, or at least about 30 days, or at least about one month.

[0441] In one embodiment, the invention provides a method of treating a cancer cell in vitro, comprising administering to a culture of a cancer cell a composition comprising an effective amount of an targeted conjugate composition, comprising a targeting moiety directed to a target of Table 2 or Table 3, Table 4, Table 18, or Table 19. and one or more payloads selected from the compounds of Tables 14-17. In another embodiment, the invention provides a method of treating a cancer in a subject, comprising administering to the subject a pharmaceutical composition comprising an effective amount of an targeted conjugate composition comprising a targeting moiety directed to a target of Table 2, or Table 3, or Table 4, Table 18 or Table 19 and one or more payloads selected from the compounds of Tables 14-17. In another embodiment of the method, the cancer is selected from the group consisting of breast cancer, ER/PR+ breast cancer, Her2+ breast cancer, triple-negative breast cancer, liver carcinoma, lung cancer, non-small cell lung cancer, mesothelioma, colorectal cancer, esophageal carcinoma, fibrosarcoma, choriocarcinoma, ovarian cancer, cervical carcinoma, laryngeal carcinoma, endometrial carcinoma, hepatocarcinoma, gastric cancer, prostate cancer, renal cell carcinoma, adenocarcinoma, Kaposi's sarcoma, astrocytoma, melanoma, squamous cell cancer, basal cell carcinoma, head and neck cancer, thyroid carcinoma, Wilm's tumor, urinary tract carcinoma, thecoma, arrhenoblastoma, glioblastomoa, pancreatic cancer, leukemia, acute myeloid leukemia (AML), chronic myeloid leukemia (PCML), acute lymphocytic leukemia (ALL), chronic lymphocytic leukemia (CLL), T-cell acute lymphoblastic leukemia, lymphoblastic disease, multiple myeloma, Hodgkin's lymphoma and non-Hodgkin's lymphoma. In another embodiment of the method, the administration results in at least a 10%, or 20%, or 30%, or 40%, or 50%, or 60%, or 70%, or 80%, or 90% greater improvement of at least one, two, or three parameters associated with a cancer compared to an untreated subject wherein the parameters are selected from the group consisting of response rate as defined by the Response Evaluation Criteria in Solid Tumors (RECIST), time-to-progression of the cancer (relapse), discovery of local recurrence, discovery of regional metastasis, discovery of distant metastasis, onset of symptoms, hospitalization, increase in pain medication requirement, requirement of salvage chemotherapy, requirement of salvage surgery, requirement of salvage radiotherapy, time-to-treatment failure, and increased time of survival.

[0442] In another aspect, the invention provides a regimen for treating a subject with a disease, said regimen comprising a composition comprising a targeted conjugate composition of any of the embodiments described herein. In one embodiment of the regimen, the regimen further comprises the step of determining the amount of pharmaceutical composition comprising the targeted conjugate composition needed to achieve a therapeutic effect in the patient.

[0443] The invention provides targeted conjugate composition comprising a treatment regimen for a diseased subject comprising administering a pharmaceutical composition comprising a conjugate of any of the embodiments described herein in two or more successive doses adminitered at an effective amount, wherein the adminstration results in the improvement of at least one parameter associated with the disease.

[0444] In some embodiments, the invention provides a method of treating a disease, comprising a regimen of administering one, or two, or three, or four or more therapeutically effective doses of a pharmaceutical composition comprising an embodiment of a targeted conjugate composition to a subject in need thereof. In one embodiment of the method, the disease is selected from the group consisting of breast cancer, ER/PR+ breast cancer, Her2+ breast cancer, triple-negative breast cancer, liver carcinoma, lung cancer, non-small cell lung cancer, colorectal cancer, esophageal carcinoma, fibrosarcoma, choriocarcinoma, ovarian cancer, cervical carcinoma, laryngeal carcinoma, endometrial carcinoma, hepatocarcinoma, gastric cancer, prostate cancer, renal cell carcinoma, Kaposi's sarcoma, astrocytoma, melanoma, squamous cell cancer, basal cell carcinoma, head and neck cancer, thyroid carcinoma, Wilm's tumor, urinary tract carcinoma, thecoma, arrhenoblastoma, glioblastomoa, and pancreatic cancer. In another embodiment of the method, the administered pharmaceutical composition comprises a targeting moiety wherein the targeting moiety has specific binding affinity for a tumor of the disease. In another embodiment of the method, the administered pharmaceutical composition comprises a targeting moiety wherein the targeting moiety has specific binding affinity for a tumor associated antigen selected from the group consisting of the tumor associated antigens of Table 3. In another embodiment of the method, the administered doses result in a decrease in the tumor size in the subject of at least 10%, or at least 20%, or at least 30%, or at least 40%, or at least 50% or greater. In the foregoing embodiment, the decrease in tumor size is achieved within at least about 7 days, or at least about 10 days, or at least about 14 days, or at least about 21 days, or at least about 30 days after the administration. In another embodiment of the method, the administered doses result in tumor stasis in the subject, wherein statsis is achieved within at least about 7 days, or at least about 10 days, or at least about 14 days, or at least about 21 days, or at least about 30 days after the administration. In the foregoing embodiments of the paragraph the regimen comprises administration of the therapeutically effective dose every 7 days, or every 10 days, or every 14 days, or every 21 days, or monthly.

[0445] In another aspect, the invention provides a targeted conjugate composition for use in the preparation of a medicament for use in treating a disease in a subject. In one embodiment, the disclosure provides a targeted conjugate composition of any of the embodiments disclosed herein for use in the preparation of a medicament for use in treating a cancer in a subject. In the foregoing embodiment, the cancer is selected from the group consisting of breast cancer, ER/PR+ breast cancer, Her2+ breast cancer, triple-negative breast cancer, liver carcinoma, lung cancer, non-small cell lung cancer, mesothelioma, colorectal cancer, esophageal carcinoma, fibrosarcoma, choriocarcinoma, ovarian cancer, cervical carcinoma, laryngeal carcinoma, endometrial carcinoma, hepatocarcinoma, gastric cancer, prostate cancer, renal cell carcinoma, adenocarcinoma, Kaposi's sarcoma, astrocytoma, melanoma, squamous cell cancer, basal cell carcinoma, head and neck cancer, thyroid carcinoma, Wilm's tumor, urinary tract carcinoma, thecoma, arrhenoblastoma, glioblastomoa, pancreatic cancer, leukemia, acute myeloid leukemia (AML), chronic myeloid leukemia (PCML), acute lymphocytic leukemia (ALL), chronic lymphocytic leukemia (CLL), T-cell acute lymphoblastic leukemia, lymphoblastic disease, multiple myeloma, Hodgkin's lymphoma and non-Hodgkin's lymphoma.

### IX). Pharmaceutical Kits

[0446] In another aspect, the invention provides a kit to facilitate the use of the conjugate compositions. In some embodiment, the kit comprises a pharmaceutical composition provided herein, a container and a label or package insert on or associated with the container. Suitable containers include, for example, bottles, vials, syringes, etc., formed from a variety of materials such as glass or plastic. The container holds a pharmaceutical composition as a formulation that is effective for treating a subject and may have a sterile access port (for example the container may be an intravenous solution bag or a vial having a stopper pierceable by a hypodermic injection needle). The package insert can list the approved indications for the drug, instructions for the reconstitution and/or administration of the drug for the use for the approved indication, appropriate dosage and safety information, and information identifying the lot and expiration of the drug. In another embodiment of the foregoing, the kit can comprise a second container that can carry a suitable diluent for the pharmaceutical composition, the use of which will provide the user with the appropriate concentration to be delivered to the subject. In another embodiment, the kit comprises, in at least a first container: a first container: an amount of a conjugate composition drug sufficient to administer in treatment of a subject with a disease; an amount of a pharmaceutically acceptable carrier; a second container that can carry a suitable diluent for the subject composition, which will provide the user with the appropriate concentration of the pharmaceutical composition to be delivered to the subject; together with a label identifying the drug and storage and handling conditions, and/or a sheet of the approved indications for the drug and instructions for the reconstitution and/or administration of the drug for the use for the treatment of a approved indication, appropriate dosage and safety information, and information identifying the lot and expiration of the drug.

### X). The Nucleic Acids Sequences of the Invention

[0447] The present invention provides isolated polynucleic acids encoding the polypeptide components of the targeted conjugate compositions and sequences complementary to polynucleic acid molecules encoding the polypeptide components of the targeted conjugate compositions. In some embodiments, the invention provides polynucleic acids encoding the targeted conjugate composition of any of the embodiments described herein, or the complement of the polynucleic acid.

[0448] In other embodiments, the invention provides polynucleic acids encoding the fusion proteins of targeting moieties, CCD, PCM and XTEN fused as a single polypeptide of any of the embodiments described herein, or the complement of the polynucleic acids. In one embodiment, the polynucleic acids encodes the protein components selected from the group consisting of the constructs of Table 5, or the complement of the polynucleic acid.

[0449] In one embodiment, the invention encompasses methods to produce polynucleic acids encoding the polypeptides of the targeted conjugate compositions, or sequences complementary to the polynucleic acids, including homologous variants thereof. In general, the methods include producing a polynucleotide sequence coding for the polypeptides of the targeted conjugate compositions and expressing the resulting gene product and assembling nucleotides encoding the components, ligating the components in frame, incorporating the encoding gene into an expression vector appropriate for a host cell, transforming the appropriate host cell with the expression vector, and culturing the host cell under conditions causing or permitting the resulting fusion protein to be expressed in the transformed host cell, thereby producing the fusion protein polypeptide, which is recovered by methods described herein or by standard protein purification methods known in the art. In one embodiment of the foregoing, the host cell is a prokaryonte cell. In another embodiment, the host cell is E. coli. Standard recombinant techniques in molecular biology are used to make the polynucleotides and expression vectors of the present invention.

[0450] In accordance with the invention, nucleic acid sequences that encode polypeptides of the targeted conjugate compositions (or its complement) are used to generate recombinant DNA molecules that direct the expression in appropriate host cells. Several cloning strategies are suitable for performing the present invention, many of which are used to generate a construct that comprises a gene coding for a composition of the present invention, or its complement. In one embodiment, the cloning strategy is used to create a gene that encodes a polypeptide of a targeted conjugate composition that comprises nucleotides encoding the polypeptide that is used to transform a host cell for expression of the polypeptide of the targeted conjugate composition. In another embodiment, the cloning strategy is used to create a gene that encodes a protein payload that comprises nucleotides encoding the payload that is used to transform a host cell for expression of the payload composition for conjugation to the polypeptides of the targeted conjugate composition.

[0451] In one approach, a construct is first prepared containing the DNA sequence corresponding to a polypeptide of the targeted conjugate composition. Exemplary methods for the preparation of such constructs are described in the Examples. The construct is then used to create an expression vector suitable for transforming a host cell, such as a prokaryotic host cell (e.g., E. coli) for the expression and recovery of the XTEN. Exemplary methods for the creation of expression vectors, the tranformation of host cells and the expression and recovery of the polypeptides of the subject compositions are described in the Examples.

[0452] The gene encoding for the polypeptides of the targeted conjugate composition can be made in one or more steps, either fully synthetically or by synthesis combined with enzymatic processes, such as restriction enzyme-mediated cloning, PCR and overlap extension, including methods more fully described in the Examples. The methods disclosed herein can be used, for example, to ligate short sequences of polynucleotides encoding the individual component genes of a desired sequence. Genes encoding polypeptides of the targeted conjugate compositions are assembled from oligonucleotides using standard techniques of gene synthesis. The gene design can be performed using algorithms that optimize codon usage and amino acid composition. The resulting genes are then assembled with genes encoding payload peptide or polypeptide of the targeted conjugate composition, and the resulting genes used to transform a host cell and produce and recover the polypeptide of the targeted conjugate composition for evaluation of its properties, as described herein.

[0453] The resulting polynucleotides encoding the polypeptides of the targeted conjugate compositions can then be individually cloned into an expression vector. The nucleic acid sequence is inserted into the vector by a variety of procedures. In general, DNA is inserted into an appropriate restriction endonuclease site(s) using techniques known in the art. Vector components generally include, but are not limited to, one or more of a signal sequence, an origin of replication, one or more marker genes, an enhancer element, a promoter, and a transcription termination sequence. Construction of suitable vectors containing one or more of these components employs standard ligation techniques which are known to the skilled artisan. Such techniques are well known in the art and well described in the scientific and patent literature. Various vectors are publicly available. The vector may, for example, be in the form of a plasmid, cosmid, viral particle, or phage that may conveniently be subjected to recombinant DNA procedures, and the choice of vector will often depend on the host cell into which it is to be introduced. Thus, the vector may be an autonomously replicating vector, i.e., a vector, which exists as an extrachromosomal entity, the replication of which is independent of chromosomal replication, e.g., a plasmid. Alternatively, the vector may be one which, when introduced into a host cell, is integrated into the host cell genome and replicated together with the chromosome(s) into which it has been integrated.

[0454] The invention provides for the use of plasmid expression vectors containing replication and control sequences that are compatible with and recognized by the host cell, and are operably linked to the gene encoding the polypeptide for controlled expression of the polypeptide. The vector ordinarily carries a replication site, as well as sequences that encode proteins that are capable of providing phenotypic selection in transformed cells. Such vector sequences are well known for a variety of bacteria, yeast, and viruses. Useful expression vectors that can be used include, for example, segments of chromosomal, non-chromosomal and synthetic DNA sequences. “Expression vector” refers to a DNA construct containing a DNA sequence that is operably linked to a suitable control sequence capable of effecting the expression of the DNA encoding the polypeptide in a suitable host. The requirements are that the vectors are replicable and viable in the host cell of choice. Low- or high-copy number vectors may be used as desired.

[0455] Suitable vectors include, but are not limited to, derivatives of SV40 and pcDNA and known bacterial plasmids such as col EI, pCRl, pBR322, pMal-C2, pET, pGEX as described by Smith, et al., Gene 57:31-40 (1988), pMB9 and derivatives thereof, plasmids such as RP4, phage DNAs such as the numerous derivatives of phage I such as NM98 9, as well as other phage DNA such as M13 and filamentous single stranded phage DNA; yeast plasmids such as the 2 micron plasmid or derivatives of the 2 m plasmid, as well as centomeric and integrative yeast shuttle vectors; vectors useful in eukaryotic cells such as vectors useful in insect or mammalian cells; vectors derived from combinations of plasmids and phage DNAs, such as plasmids that have been modified to employ phage DNA or the expression control sequences; and the like. Yeast expression systems that can also be used in the present invention include, but are not limited to, the non-fusion pYES2 vector (Invitrogen), the fusion pYESHisA, B, C (Invitrogen), pRS vectors and the like. The control sequences of the vector include a promoter to effect transcription, an optional operator sequence to control such transcription, a sequence encoding suitable mRNA ribosome binding sites, and sequences that control termination of transcription and translation. The promoter may be any DNA sequence, which shows transcriptional activity in the host cell of choice and may be derived from genes encoding proteins either homologous or heterologous to the host cell. Promoters suitable for use in expression vectors with prokaryotic hosts include the β-lactamase and lactose promoter systems [Chang et al., Nature, 275:615 (1978); Goeddel et al., Nature, 281:544 (1979)], alkaline phosphatase, a tryptophan (trp) promoter system [Goeddel, Nucleic Acids Res., 8:4057 (1980); EP 36,776], and hybrid promoters such as the tac promoter [deBoer et al., Proc. Natl. Acad. Sci. USA, 80:21-25 (1983)], all is operably linked to the DNA encoding CFXTEN polypeptides. Promoters for use in bacterial systems can also contain a Shine-Dalgarno (S. D.) sequence, operably linked to the DNA encoding CFXTEN polypeptides.

### XI). Concatenate Sequences of the Invention

[0456] In another aspect, the invention provides compositions comprising fusion proteins of concatenates of polypeptide components of targeted conjugate compositions useful in making or assembling targeted conjugate compositions. As illustrated in FIGS. 87B and C, the contantenate sequences of the sequences of Tables 26 and 27 are fusion proteins having at least four different configurations, in an N-terminus to C-terminus configuration; 1) a FRH4 sequence, a CCD, a PCM, and a short XTEN sequence of 228 amino acids; 2) a FRL4 sequence, a CCD, a PCM, and a short XTEN sequence of 228 amino acids; 3) a short XTEN sequence of 229 amino acids, a PCM, a CCD, and a FRL1; and 4) a short XTEN sequence of 229 amino acids, a PCM, a CCD, and a FRH1. It is an object of the invention to provide fusion protein concatenates in compositions of targeted conjugate compositions in which a concatenate sequence is inserted into a fusion protein between a scFv of the embodiments disclosed herein (less the corresponding FR sequences WGQGTLVTVS (SEQ ID NO: 613), or TFGQGTKVEIK (SEQ ID NO: 614), or EVQLVESGGG (SEQ ID NO: 615), or DIQMTQSPSS (SEQ ID NO: 616)) and an XTEN of Table 10 or Table 11. The resulting fusion protein would then be conjugated to one or more payload drugs or biologics described herein, including but not limited to those of Tables 14-17, resulting in the targeted conjugate composition.

[0457] In one embodiment, the invention provides compositions comprising sequences exhibiting at least about 90%, or at least about 91%, or at least about 92%, or at least about 93%, or at least about 94%, or at least about 95%, or at least about 96%, or at least about 97%, or at least about 98%, or at least about 99% identity, or is identical to a sequence selected from the group of sequences set forth in Table 26. In another embodiment, the invention provides compositions comprising sequences exhibiting at least about 90%, or at least about 91%, or at least about 92%, or at least about 93%, or at least about 94%, or at least about 95%, or at least about 96%, or at least about 97%, or at least about 98%, or at least about 99% identity, or is identical to a sequence selected from the group of sequences set forth in Table 27.

[0458] In another embodiment, the invention provides compositions comprising a fusion protein having the components, in an N- to C-terminal orientation:1) a first region comprising a scFv derived from an antibody of Table 19 comprising a FRL1, CDRL1, FRL2, CDRL2, FRL3, CRL3, a FRL4, a linker from Table 20, FRH1, CDRH1, FRH2, CDRH2, FRH3, and CRH3 sequences; 2) a second region comprising a sequence exhibiting at least about 90%, or at least about 91%, or at least about 92%, or at least about 93%, or at least about 94%, or at least about 95%, or at least about 96%, or at least about 97%, or at least about 98%, or at least about 99% identity, or is identical to a sequence from Table 26; and 3) a third region comprising an XTEN exhibiting at least about 90%, or at least about 91%, or at least about 92%, or at least about 93%, or at least about 94%, or at least about 95%, or at least about 96%, or at least about 97%, or at least about 98%, or at least about 99% identity, or is identical to a sequence selected from the group of sequences set forth in Table 10 or Table 11.

[0459] In another embodiment, the invention provides compositions comprising a fusion protein having the components, in an N- to C-terminal orientation; 1) a first region comprising a scFv derived from an antibody of Table 19 comprising a FRH1, CDRH1, FRH2, CDRH2, FRH3, CRH3, a FRH4, a linker from Table 20, FRL1, CDRL1, FRL2, CDRL2, FRL3, and a CRL3 sequences; 2) a second region comprising a sequence exhibiting at least about 90%, or at least about 91%, or at least about 92%, or at least about 93%, or at least about 94%, or at least about 95%, or at least about 96%, or at least about 97%, or at least about 98%, or at least about 99% identity, or is identical to a sequence from Table 26; and 3) a third region comprising an XTEN exhibiting at least about 90%, or at least about 91%, or at least about 92%, or at least about 93%, or at least about 94%, or at least about 95%, or at least about 96%, or at least about 97%, or at least about 98%, or at least about 99% identity, or is identical to a sequence selected from the group of sequences set forth in Table 10 or Table 11.

[0460] In another embodiment, the invention provides compositions comprising a fusion protein having the components, in an N- to C-terminal orientation:1) a first region comprising an XTEN exhibiting at least about 90%, or at least about 91%, or at least about 92%, or at least about 93%, or at least about 94%, or at least about 95%, or at least about 96%, or at least about 97%, or at least about 98%, or at least about 99% identity, or is identical to a sequence selected from the group of sequences set forth in Table 10 or Table 11; 2) a second region comprising a sequence exhibiting at least about 90%, or at least about 91%, or at least about 92%, or at least about 93%, or at least about 94%, or at least about 95%, or at least about 96%, or at least about 97%, or at least about 98%, or at least about 99% identity, or is identical to a sequence from Table 27; and 3) a third region comprising a a scFv derived from an antibody of Table 19 comprising CDRL1, FRL2, CDRL2, FRL3, CRL3, a FRL4, a linker from Table 20, FRH1, CDRH1, FRH2, CDRH2, FRH3, CRH3 and FRH4 sequences.

[0461] In another embodiment, the invention provides compositions comprising a fusion protein having the components, in an N- to C-terminal orientation:1) a first region comprising an XTEN exhibiting at least about 90%, or at least about 91%, or at least about 92%, or at least about 93%, or at least about 94%, or at least about 95%, or at least about 96%, or at least about 97%, or at least about 98%, or at least about 99% identity, or is identical to a sequence selected from the group of sequences set forth in Table 10 or Table 11; 2) a second region comprising a sequence exhibiting at least about 90%, or at least about 91%, or at least about 92%, or at least about 93%, or at least about 94%, or at least about 95%, or at least about 96%, or at least about 97%, or at least about 98%, or at least about 99% identity, or is identical to a sequence from Table 27; and 3) a third region comprising a a scFv derived from an antibody of Table 19 comprising CDRH1, FRH2, CDRH2, FRH3, CRH3, a FRH4, a linker from Table 20, FRL1, CDRL1, FRL2, CDRL2, FRL3, CRL3 and FRH4 sequences.

[0462] In other embodiments, the invention provides a targeted conjugate composition comprising the fusion proteins of the paragraphs of this section with a drug or biologic linked to the cysteine residues wherein the drug or biologic is selected from the drugs or biologics of Tables 14-17. In one embodiment of the foregoing the drug or biologic is selected from the group consisting of group consisting of doxorubicin, nemorubicin, PNU-159682, paclitaxel, docetaxel, auristatin E, auristatin F, dolastatin 10, dolastatin 15, monomethyl auristatin E (MMAE), monomethyl auristatin F (MMAF), monomethyl auristatin D (MMAD), maytansine, mertansine (DM1), maytansinoid DM4, calicheamicin, N-acetyl-calicheamicin, vinblastine, vincristine, vindesine, vinorelbine, camptothecin, topotecan, irinotecan, SN-38, duocarmycin A, duocarmycin B1, duocarmycin B2, duocarmycin C1, duocarmycin C2, duocarmycin D, duocarmycin SA, duocarmycin TM, duocarmycin MB, duocarmycin DM, mitomycin C, rachelmycin, epothilone A, epothilone B, epothilone C, tubulysin B, tubulysin M, pyrrolobenzodiazepine (PBD), bortezomib, hTNF, I1-12, ranpirnase, hTNF, IL-12, ranpirnase, human ribonuclease (RNAse), Bovine pancreatic RNase, pokeweed antiviral protein, Pseudomonas exotoxin A, gelonin, ricin-A, interferon-alpha, interferon-lambda, urease, amatoxin, alpha-amanitin, beta-amanitin, gamma-amanitin, epsilon-amanitin, bouganin, and staphylococcal enterotoxin.

TABLE 26
Concatenates of fusion protein components for targeted conjugate compositions

| | | SEQ ID |
|---|---|---|
| No. | Amino Acid Sequences of FR4-CCD-PCM-XTEN* | NO: |
| 1 | WGQGTLVTVSGSPGAGSCAGLSGRSDNHSPLGLAGSPGSPAGSPTSTEEGTSESATPES | 617 |
| | GPGTSTEPSEGSAPGSPAGSPTSTEEGTSTEPSEGSAPGTSTEPSEGSAPGTSESATPE | |
| | SGPGSEPATSGSETPGSEPATSGSETPGSPAGSPTSTEEGTSESATPESGPGTSTEPSE | |
| | GSAPGTSTEPSEGSAPGSPAGSPTSTEEGTSTEPSEGSAPGTSTEPSEGSAPGTSESAT | |
| | PESGPGTSTEPSEGSAPGTSESATPESGPGSEPATSGSETPGTSTEPSEGSAPGTSTEP | |
| | SEGSAPGTSESATPESGPGTSESATPESG | |
| 2 | WGQGTLVTVSGAPCGALSGRSDNHSPLGLAGSPGSPAGSPTSTEEGTSESATPESGPGT | 618 |
| | STEPSEGSAPGSPAGSPTSTEEGTSTEPSEGSAPGTSTEPSEGSAPGTSESATPESGPG | |
| | SEPATSGSETPGSEPATSGSETPGSPAGSPTSTEEGTSESATPESGPGTSTEPSEGSAP | |
| | GTSTEPSEGSAPGSPAGSPTSTEEGTSTEPSEGSAPGTSTEPSEGSAPGTSESATPESG | |
| | PGTSTEPSEGSAPGTSESATPESGPGSEPATSGSETPGTSTEPSEGSAPGTSTEPSEGS | |
| | APGTSESATPESGPGTSESATPESG | |
| 3 | WGQGTLVTVSGSPGAGSCAGSPTSTEEGTSESACSPEGPGTSTEPSEGSCGGLSGRSDN | 619 |
| | HSPLGLAGSPGSPAGSPTSTEEGTSESATPESGPGTSTEPSEGSAPGSPAGSPTSTEEG | |
| | TSTEPSEGSAPGTSTEPSEGSAPGTSESATPESGPGSEPATSGSETPGSEPATSGSETP | |
| | GSPAGSPTSTEEGTSESATPESGPGTSTEPSEGSAPGTSTEPSEGSAPGSPAGSPTSTE | |
| | EGTSTEPSEGSAPGTSTEPSEGSAPGTSESATPESGPGTSTEPSEGSAPGTSESATPES | |
| | GPGSEPATSGSETPGTSTEPSEGSAPGTSTEPSEGSAPGTSESATPESGPGTSESATPE | |
| | SG | |
| 4 | WGQGTLVTVSGAPCGAGCAGPCGPLSGRSDNHSPLGLAGSPGSPAGSPTSTEEGTSESA | 620 |
| | TPESGPGTSTEPSEGSAPGSPAGSPTSTEEGTSTEPSEGSAPGTSTEPSEGSAPGTSES | |
| | ATPESGPGSEPATSGSETPGSEPATSGSETPGSPAGSPTSTEEGTSESATPESGPGTST | |
| | EPSEGSAPGTSTEPSEGSAPGSPAGSPTSTEEGTSTEPSEGSAPGTSTEPSEGSAPGTS | |
| | ESATPESGPGTSTEPSEGSAPGTSESATPESGPGSEPATSGSETPGTSTEPSEGSAPGT | |
| | STEPSEGSAPGTSESATPESGPGTSESATPESG | |
| 5 | WGQGTLVTVSGSPGAGSCAGSPTSTEEGTSESACSPEGPGTSTEPSEGSCGPSPAGSPT | 621 |
| | STEEGTCTEPSEGSAPGTSEPTCSGSAPGTSESATPESCGPSEPATSGSETPGSCAPTS | |
| | GSETPGSPAGSCTSTEEGTSESATPESCGPTESASGLSGRSDNHSPLGLAGSPGSPAGS | |
| | PTSTEEGTSESATPESGPGTSTEPSEGSAPGSPAGSPTSTEEGTSTEPSEGSAPGTSTE | |
| | PSEGSAPGTSESATPESGPGSEPATSGSETPGSEPATSGSETPGSPAGSPTSTEEGTSE | |
| | SATPESGPGTSTEPSEGSAPGTSTEPSEGSAPGSPAGSPTSTEEGTSTEPSEGSAPGTS | |
| | TEPSEGSAPGTSESATPESGPGTSTEPSEGSAPGTSESATPESGPGSEPATSGSETPGT | |
| | STEPSEGSAPGTSTEPSEGSAPGTSESATPESGPGTSESATPESG | |
| 6 | WGQGTLVTVSGSPGAGSCTETSPSTCPTESPEACGSGSGSPCSPSGTEACSTSGSEGCS | 622 |
| | PSSTAPCGPTETEGCTTSSGPPCPESATSEGLSGRSDNHSPLGLAGSPGSPAGSPTSTE | |
| | EGTSESATPESGPGTSTEPSEGSAPGSPAGSPTSTEEGTSTEPSEGSAPGTSTEPSEGS | |
| | APGTSESATPESGPGSEPATSGSETPGSEPATSGSETPGSPAGSPTSTEEGTSESATPE | |
| | SGPGTSTEPSEGSAPGTSTEPSEGSAPGSPAGSPTSTEEGTSTEPSEGSAPGTSTEPSE | |
| | GSAPGTSESATPESGPGTSTEPSEGSAPGTSESATPESGPGSEPATSGSETPGTSTEPS | |
| | EGSAPGTSTEPSEGSAPGTSESATPESGPGTSESATPESG | |
| 7 | WGQGTLVTVSGSPGAGSCAGSPLGLAGSLSGRSDNHPGSPAGSPTSTEEGTSESATPES | 623 |
| | GPGTSTEPSEGSAPGSPAGSPTSTEEGTSTEPSEGSAPGTSTEPSEGSAPGTSESATPE | |
| | SGPGSEPATSGSETPGSEPATSGSETPGSPAGSPTSTEEGTSESATPESGPGTSTEPSE | |
| | GSAPGTSTEPSEGSAPGSPAGSPTSTEEGTSTEPSEGSAPGTSTEPSEGSAPGTSESAT | |
| | PESGPGTSTEPSEGSAPGTSESATPESGPGSEPATSGSETPGTSTEPSEGSAPGTSTEP | |
| | SEGSAPGTSESATPESGPGTSESATPESG | |
| 8 | WGQGTLVTVSGAPCGASPLGLAGSLSGRSDNHPGSPAGSPTSTEEGTSESATPESGPGT | 624 |
| | STEPSEGSAPGSPAGSPTSTEEGTSTEPSEGSAPGTSTEPSEGSAPGTSESATPESGPG | |
| | SEPATSGSETPGSEPATSGSETPGSPAGSPTSTEEGTSESATPESGPGTSTEPSEGSAP | |
| | GTSTEPSEGSAPGSPAGSPTSTEEGTSTEPSEGSAPGTSTEPSEGSAPGTSESATPESG | |
| | PGTSTEPSEGSAPGTSESATPESGPGSEPATSGSETPGTSTEPSEGSAPGTSTEPSEGS | |
| | APGTSESATPESGPGTSESATPESG | |
| 9 | WGQGTLVTVSGSPGAGSCAGSPTSTEEGTSESACSPEGPGTSTEPSEGSCGGSPLGLAG | 625 |
| | SLSGRSDNHPGSPAGSPTSTEEGTSESATPESGPGTSTEPSEGSAPGSPAGSPTSTEEG | |
| | TSTEPSEGSAPGTSTEPSEGSAPGTSESATPESGPGSEPATSGSETPGSEPATSGSETP | |
| | GSPAGSPTSTEEGTSESATPESGPGTSTEPSEGSAPGTSTEPSEGSAPGSPAGSPTSTE | |
| | EGTSTEPSEGSAPGTSTEPSEGSAPGTSESATPESGPGTSTEPSEGSAPGTSESATPES | |
| | GPGSEPATSGSETPGTSTEPSEGSAPGTSTEPSEGSAPGTSESATPESGPGTSESATPE | |
| | SG | |
| 10 | WGQGTLVTVSGAPCGAGCAGPCGPSPLGLAGSLSGRSDNHPGSPAGSPTSTEEGTSESA | 626 |
| | TPESGPGTSTEPSEGSAPGSPAGSPTSTEEGTSTEPSEGSAPGTSTEPSEGSAPGTSES | |
| | ATPESGPGSEPATSGSETPGSEPATSGSETPGSPAGSPTSTEEGTSESATPESGPGTST | |
| | EPSEGSAPGTSTEPSEGSAPGSPAGSPTSTEEGTSTEPSEGSAPGTSTEPSEGSAPGTS | |
| | ESATPESGPGTSTEPSEGSAPGTSESATPESGPGSEPATSGSETPGTSTEPSEGSAPGT | |
| | STEPSEGSAPGTSESATPESGPGTSESATPESG | |
| 11 | WGQGTLVTVSGSPGAGSCAGSPTSTEEGTSESACSPEGPGTSTEPSEGSCGPSPAGSPT | 627 |
| | STEEGTCTEPSEGSAPGTSEPTCSGSAPGTSESATPESCGPSEPATSGSETPGSCAPTS | |
| | GSETPGSPAGSCTSTEEGTSESATPESCGPTESASGSPLGLAGSLSGRSDNHPGSPAGS | |
| | PTSTEEGTSESATPESGPGTSTEPSEGSAPGSPAGSPTSTEEGTSTEPSEGSAPGTSTE | |
| | PSEGSAPGTSESATPESGPGSEPATSGSETPGSEPATSGSETPGSPAGSPTSTEEGTSE | |
| | SATPESGPGTSTEPSEGSAPGTSTEPSEGSAPGSPAGSPTSTEEGTSTEPSEGSAPGTS | |
| | TEPSEGSAPGTSESATPESGPGTSTEPSEGSAPGTSESATPESGPGSEPATSGSETPGT | |
| | STEPSEGSAPGTSTEPSEGSAPGTSESATPESGPGTSESATPESG | |
| 12 | WGQGTLVTVSGSPGAGSCTETSPSTCPTESPEACGSGSGSPCSPSGTEACSTSGSEGCS | 628 |
| | PSSTAPCGPTETEGCTTSSGPPCPESATSEGSPLGLAGSLSGRSDNHPGSPAGSPTSTE | |
| | EGTSESATPESGPGTSTEPSEGSAPGSPAGSPTSTEEGTSTEPSEGSAPGTSTEPSEGS | |
| | APGTSESATPESGPGSEPATSGSETPGSEPATSGSETPGSPAGSPTSTEEGTSESATPE | |
| | SGPGTSTEPSEGSAPGTSTEPSEGSAPGSPAGSPTSTEEGTSTEPSEGSAPGTSTEPSE | |
| | GSAPGTSESATPESGPGTSTEPSEGSAPGTSESATPESGPGSEPATSGSETPGTSTEPS | |
| | EGSAPGTSTEPSEGSAPGTSESATPESGPGTSESATPESG | |
| 13 | WGQGTLVTVSGSPGAGSCAGSPLGLSGRSDNHPGSPAGSPTSTEEGTSESATPESGPGT | 629 |
| | STEPSEGSAPGSPAGSPTSTEEGTSTEPSEGSAPGTSTEPSEGSAPGTSESATPESGPG | |
| | SEPATSGSETPGSEPATSGSETPGSPAGSPTSTEEGTSESATPESGPGTSTEPSEGSAP | |
| | GTSTEPSEGSAPGSPAGSPTSTEEGTSTEPSEGSAPGTSTEPSEGSAPGTSESATPESG | |
| | PGTSTEPSEGSAPGTSESATPESGPGSEPATSGSETPGTSTEPSEGSAPGTSTEPSEGS | |
| | APGTSESATPESGPGTSESATPESG | |
| 14 | WGQGTLVTVSGAPCGASPLGLSGRSDNHPGSPAGSPTSTEEGTSESATPESGPGTSTEP | 630 |
| | SEGSAPGSPAGSPTSTEEGTSTEPSEGSAPGTSTEPSEGSAPGTSESATPESGPGSEPA | |
| | TSGSETPGSEPATSGSETPGSPAGSPTSTEEGTSESATPESGPGTSTEPSEGSAPGTST | |
| | EPSEGSAPGSPAGSPTSTEEGTSTEPSEGSAPGTSTEPSEGSAPGTSESATPESGPGTS | |
| | TEPSEGSAPGTSESATPESGPGSEPATSGSETPGTSTEPSEGSAPGTSTEPSEGSAPGT | |
| | SESATPESGPGTSESATPESG | |
| 15 | WGQGTLVTVSGSPGAGSCAGSPTSTEEGTSESACSPEGPGTSTEPSEGSCGGSPLGLSG | 631 |
| | RSDNHPGSPAGSPTSTEEGTSESATPESGPGTSTEPSEGSAPGSPAGSPTSTEEGTSTE | |
| | PSEGSAPGTSTEPSEGSAPGTSESATPESGPGSEPATSGSETPGSEPATSGSETPGSPA | |
| | GSPTSTEEGTSESATPESGPGTSTEPSEGSAPGTSTEPSEGSAPGSPAGSPTSTEEGTS | |
| | TEPSEGSAPGTSTEPSEGSAPGTSESATPESGPGTSTEPSEGSAPGTSESATPESGPGS | |
| | EPATSGSETPGTSTEPSEGSAPGTSTEPSEGSAPGTSESATPESGPGTSESATPESG | |
| 16 | WGQGTLVTVSGAPCGAGCAGPCGPSPLGLSGRSDNHPGSPAGSPTSTEEGTSESATPES | 632 |
| | GPGTSTEPSEGSAPGSPAGSPTSTEEGTSTEPSEGSAPGTSTEPSEGSAPGTSESATPE | |
| | SGPGSEPATSGSETPGSEPATSGSETPGSPAGSPTSTEEGTSESATPESGPGTSTEPSE | |
| | GSAPGTSTEPSEGSAPGSPAGSPTSTEEGTSTEPSEGSAPGTSTEPSEGSAPGTSESAT | |
| | PESGPGTSTEPSEGSAPGTSESATPESGPGSEPATSGSETPGTSTEPSEGSAPGTSTEP | |
| | SEGSAPGTSESATPESGPGTSESATPESG | |
| 17 | WGQGTLVTVSGSPGAGSCAGSPTSTEEGTSESACSPEGPGTSTEPSEGSCGPSPAGSPT | 633 |
| | STEEGTCTEPSEGSAPGTSEPTCSGSAPGTSESATPESCGPSEPATSGSETPGSCAPTS | |
| | GSETPGSPAGSCTSTEEGTSESATPESCGPTESASGSPLGLSGRSDNHPGSPAGSPTST | |
| | EEGTSESATPESGPGTSTEPSEGSAPGSPAGSPTSTEEGTSTEPSEGSAPGTSTEPSEG | |
| | SAPGTSESATPESGPGSEPATSGSETPGSEPATSGSETPGSPAGSPTSTEEGTSESATP | |
| | ESGPGTSTEPSEGSAPGTSTEPSEGSAPGSPAGSPTSTEEGTSTEPSEGSAPGTSTEPS | |
| | EGSAPGTSESATPESGPGTSTEPSEGSAPGTSESATPESGPGSEPATSGSETPGTSTEP | |
| | SEGSAPGTSTEPSEGSAPGTSESATPESGPGTSESATPESG | |
| 18 | WGQGTLVTVSGSPGAGSCTETSPSTCPTESPEACGSGSGSPCSPSGTEACSTSGSEGCS | 634 |
| | PSSTAPCGPTETEGCTTSSGPPCPESATSEGSPLGLSGRSDNHPGSPAGSPTSTEEGTS | |
| | ESATPESGPGTSTEPSEGSAPGSPAGSPTSTEEGTSTEPSEGSAPGTSTEPSEGSAPGT | |
| | SESATPESGPGSEPATSGSETPGSEPATSGSETPGSPAGSPTSTEEGTSESATPESGPG | |
| | TSTEPSEGSAPGTSTEPSEGSAPGSPAGSPTSTEEGTSTEPSEGSAPGTSTEPSEGSAP | |
| | GTSESATPESGPGTSTEPSEGSAPGTSESATPESGPGSEPATSGSETPGTSTEPSEGSA | |
| | PGTSTEPSEGSAPGTSESATPESGPGTSESATPESG | |
| 19 | WGQGTLVTVSGSPGAGSCAGLAGRSDNHVPLSLSMGPGSPAGSPTSTEEGTSESATPES | 635 |
| | GPGTSTEPSEGSAPGSPAGSPTSTEEGTSTEPSEGSAPGTSTEPSEGSAPGTSESATPE | |
| | SGPGSEPATSGSETPGSEPATSGSETPGSPAGSPTSTEEGTSESATPESGPGTSTEPSE | |
| | GSAPGTSTEPSEGSAPGSPAGSPTSTEEGTSTEPSEGSAPGTSTEPSEGSAPGTSESAT | |
| | PESGPGTSTEPSEGSAPGTSESATPESGPGSEPATSGSETPGTSTEPSEGSAPGTSTEP | |
| | SEGSAPGTSESATPESGPGTSESATPESG | |
| 20 | WGQGTLVTVSGAPCGALAGRSDNHVPLSLSMGPGSPAGSPTSTEEGTSESATPESGPGT | 636 |
| | STEPSEGSAPGSPAGSPTSTEEGTSTEPSEGSAPGTSTEPSEGSAPGTSESATPESGPG | |
| | SEPATSGSETPGSEPATSGSETPGSPAGSPTSTEEGTSESATPESGPGTSTEPSEGSAP | |
| | GTSTEPSEGSAPGSPAGSPTSTEEGTSTEPSEGSAPGTSTEPSEGSAPGTSESATPESG | |
| | PGTSTEPSEGSAPGTSESATPESGPGSEPATSGSETPGTSTEPSEGSAPGTSTEPSEGS | |
| | APGTSESATPESGPGTSESATPESG | |
| 21 | WGQGTLVTVSGSPGAGSCAGSPTSTEEGTSESACSPEGPGTSTEPSEGSCGGLAGRSDN | 637 |
| | HVPLSLSMGPGSPAGSPTSTEEGTSESATPESGPGTSTEPSEGSAPGSPAGSPTSTEEG | |
| | TSTEPSEGSAPGTSTEPSEGSAPGTSESATPESGPGSEPATSGSETPGSEPATSGSETP | |
| | GSPAGSPTSTEEGTSESATPESGPGTSTEPSEGSAPGTSTEPSEGSAPGSPAGSPTSTE | |
| | EGTSTEPSEGSAPGTSTEPSEGSAPGTSESATPESGPGTSTEPSEGSAPGTSESATPES | |
| | GPGSEPATSGSETPGTSTEPSEGSAPGTSTEPSEGSAPGTSESATPESGPGTSESATPE | |
| | SG | |
| 22 | WGQGTLVTVSGAPCGAGCAGPCGPLAGRSDNHVPLSLSMGPGSPAGSPTSTEEGTSESA | 638 |
| | TPESGPGTSTEPSEGSAPGSPAGSPTSTEEGTSTEPSEGSAPGTSTEPSEGSAPGTSES | |
| | ATPESGPGSEPATSGSETPGSEPATSGSETPGSPAGSPTSTEEGTSESATPESGPGTST | |
| | EPSEGSAPGTSTEPSEGSAPGSPAGSPTSTEEGTSTEPSEGSAPGTSTEPSEGSAPGTS | |
| | ESATPESGPGTSTEPSEGSAPGTSESATPESGPGSEPATSGSETPGTSTEPSEGSAPGT | |
| | STEPSEGSAPGTSESATPESGPGTSESATPESG | |
| 23 | WGQGTLVTVSGSPGAGSCAGSPTSTEEGTSESACSPEGPGTSTEPSEGSCGPSPAGSPT | 639 |
| | STEEGTCTEPSEGSAPGTSEPTCSGSAPGTSESATPESCGPSEPATSGSETPGSCAPTS | |
| | GSETPGSPAGSCTSTEEGTSESATPESCGPTESASGLAGRSDNHVPLSLSMGPGSPAGS | |
| | PTSTEEGTSESATPESGPGTSTEPSEGSAPGSPAGSPTSTEEGTSTEPSEGSAPGTSTE | |
| | PSEGSAPGTSESATPESGPGSEPATSGSETPGSEPATSGSETPGSPAGSPTSTEEGTSE | |
| | SATPESGPGTSTEPSEGSAPGTSTEPSEGSAPGSPAGSPTSTEEGTSTEPSEGSAPGTS | |
| | TEPSEGSAPGTSESATPESGPGTSTEPSEGSAPGTSESATPESGPGSEPATSGSETPGT | |
| | STEPSEGSAPGTSTEPSEGSAPGTSESATPESGPGTSESATPESG | |
| 24 | WGQGTLVTVSGSPGAGSCTETSPSTCPTESPEACGSGSGSPCSPSGTEACSTSGSEGCS | 640 |
| | PSSTAPCGPTETEGCTTSSGPPCPESATSEGLAGRSDNHVPLSLSMGPGSPAGSPTSTE | |
| | EGTSESATPESGPGTSTEPSEGSAPGSPAGSPTSTEEGTSTEPSEGSAPGTSTEPSEGS | |
| | APGTSESATPESGPGSEPATSGSETPGSEPATSGSETPGSPAGSPTSTEEGTSESATPE | |
| | SGPGTSTEPSEGSAPGTSTEPSEGSAPGSPAGSPTSTEEGTSTEPSEGSAPGTSTEPSE | |
| | GSAPGTSESATPESGPGTSTEPSEGSAPGTSESATPESGPGSEPATSGSETPGTSTEPS | |
| | EGSAPGTSTEPSEGSAPGTSESATPESGPGTSESATPESG | |
| 25 | TFGQGTKVEIKGSPGAGSCAGLSGRSDNHSPLGLAGSPGSPAGSPTSTEEGTSESATPE | 641 |
| | SGPGTSTEPSEGSAPGSPAGSPTSTEEGTSTEPSEGSAPGTSTEPSEGSAPGTSESATP | |
| | ESGPGSEPATSGSETPGSEPATSGSETPGSPAGSPTSTEEGTSESATPESGPGTSTEPS | |
| | EGSAPGTSTEPSEGSAPGSPAGSPTSTEEGTSTEPSEGSAPGTSTEPSEGSAPGTSESA | |
| | TPESGPGTSTEPSEGSAPGTSESATPESGPGSEPATSGSETPGTSTEPSEGSAPGTSTE | |
| | PSEGSAPGTSESATPESGPGTSESATPESG | |
| 26 | TFGQGTKVEIKGAPCGALSGRSDNHSPLGLAGSPGSPAGSPTSTEEGTSESATPESGPG | 642 |
| | TSTEPSEGSAPGSPAGSPTSTEEGTSTEPSEGSAPGTSTEPSEGSAPGTSESATPESGP | |
| | GSEPATSGSETPGSEPATSGSETPGSPAGSPTSTEEGTSESATPESGPGTSTEPSEGSA | |
| | PGTSTEPSEGSAPGSPAGSPTSTEEGTSTEPSEGSAPGTSTEPSEGSAPGTSESATPES | |
| | GPGTSTEPSEGSAPGTSESATPESGPGSEPATSGSETPGTSTEPSEGSAPGTSTEPSEG | |
| | SAPGTSESATPESGPGTSESATESG | |
| 27 | TFGQGTKVEIKGSPGAGSCAGSPTSTEEGTSESACSPEGPGTSTEPSEGSCGGLSGRSD | 643 |
| | NHSPLGLAGSPGSPAGSPTSTEEGTSESATPESGPGTSTEPSEGSAPGSPAGSPTSTEE | |
| | GTSTEPSEGSAPGTSTEPSEGSAPGTSESATPESGPGSEPATSGSETPGSEPATSGSET | |
| | PGSPAGSPTSTEEGTSESATPESGPGTSTEPSEGSAPGTSTEPSEGSAPGSPAGSPTST | |
| | EEGTSTEPSEGSAPGTSTEPSEGSAPGTSESATPESGPGTSTEPSEGSAPGTSESATPE | |
| | SGPGSEPATSGSETPGTSTEPSEGSAPGTSTEPSEGSAPGTSESATPESGPGTSESATP | |
| | ESG | |
| 28 | TFGQGTKVEIKGAPCGAGCAGPCGPLSGRSDNHSPLGLAGSPGSPAGSPTSTEEGTSES | 644 |
| | ATPESGPGTSTEPSEGSAPGSPAGSPTSTEEGTSTEPSEGSAPGTSTEPSEGSAPGTSE | |
| | SATPESGPGSEPATSGSETPGSEPATSGSETPGSPAGSPTSTEEGTSESATPESGPGTS | |
| | TEPSEGSAPGTSTEPSEGSAPGSPAGSPTSTEEGTSTEPSEGSAPGTSTEPSEGSAPGT | |
| | SESATPESGPGTSTEPSEGSAPGTSESATPESGPGSEPATSGSETPGTSTEPSEGSAPG | |
| | TSTEPSEGSAPGTSESATPESGPGTSESATPESG | |
| 29 | TFGQGTKVEIKGSPGAGSCAGSPTSTEEGTSESACSPEGPGTSTEPSEGSCGPSPAGSP | 645 |
| | TSTEEGTCTEPSEGSAPGTSEPTCSGSAPGTSESATPESCGPSEPATSGSETPGSCAPT | |
| | SGSETPGSPAGSCTSTEEGTSESATPESCGPTESASGLSGRSDNHSPLGLAGSPGSPAG | |
| | SPTSTEEGTSESATPESGPGTSTEPSEGSAPGSPAGSPTSTEEGTSTEPSEGSAPGTST | |
| | EPSEGSAPGTSESATPESGPGSEPATSGSETPGSEPATSGSETPGSPAGSPTSTEEGTS | |
| | ESATPESGPGTSTEPSEGSAPGTSTEPSEGSAPGSPAGSPTSTEEGTSTEPSEGSAPGT | |
| | STEPSEGSAPGTSESATPESGPGTSTEPSEGSAPGTSESATPESGPGSEPATSGSETPG | |
| | TSTEPSEGSAPGTSTEPSEGSAPGTSESATPESGPGTSESATPESG | |
| 30 | TFGQGTKVEIKGSPGAGSCTETSPSTCPTESPEACGSGSGSPCSPSGTEACSTSGSEGC | 646 |
| | SPSSTAPCGPTETEGCTTSSGPPCPESATSEGLSGRSDNHSPLGLAGSPGSPAGSPTST | |
| | EEGTSESATPESGPGTSTEPSEGSAPGSPAGSPTSTEEGTSTEPSEGSAPGTSTEPSEG | |
| | SAPGTSESATPESGPGSEPATSGSETPGSEPATSGSETPGSPAGSPTSTEEGTSESATP | |
| | ESGPGTSTEPSEGSAPGTSTEPSEGSAPGSPAGSPTSTEEGTSTEPSEGSAPGTSTEPS | |
| | EGSAPGTSESATPESGPGTSTEPSEGSAPGTSESATPESGPGSEPATSGSETPGTSTEP | |
| | SEGSAPGTSTEPSEGSAPGTSESATPESGPGTSESATPESG | |
| 31 | TFGQGTKVEIKGSPGAGSCAGSPLGLAGSLSGRSDNHPGSPAGSPTSTEEGTSESATPE | 647 |
| | SGPGTSTEPSEGSAPGSPAGSPTSTEEGTSTEPSEGSAPGTSTEPSEGSAPGTSESATP | |
| | ESGPGSEPATSGSETPGSEPATSGSETPGSPAGSPTSTEEGTSESATPESGPGTSTEPS | |
| | EGSAPGTSTEPSEGSAPGSPAGSPTSTEEGTSTEPSEGSAPGTSTEPSEGSAPGTSESA | |
| | TPESGPGTSTEPSEGSAPGTSESATPESGPGSEPATSGSETPGTSTEPSEGSAPGTSTE | |
| | PSEGSAPGTSESATPESGPGTSESATPESG | |
| 32 | TFGQGTKVEIKGAPCGASPLGLAGSLSGRSDNHPGSPAGSPTSTEEGTSESATPESGPG | 648 |
| | TSTEPSEGSAPGSPAGSPTSTEEGTSTEPSEGSAPGTSTEPSEGSAPGTSESATPESGP | |
| | GSEPATSGSETPGSEPATSGSETPGSPAGSPTSTEEGTSESATPESGPGTSTEPSEGSA | |
| | PGTSTEPSEGSAPGSPAGSPTSTEEGTSTEPSEGSAPGTSTEPSEGSAPGTSESATPES | |
| | GPGTSTEPSEGSAPGTSESATPESGPGSEPATSGSETPGTSTEPSEGSAPGTSTEPSEG | |
| | SAPGTSESATPESGPGTSESATPESG | |
| 33 | TFGQGTKVEIKGSPGAGSCAGSPTSTEEGTSESACSPEGPGTSTEPSEGSCGGSPLGLA | 649 |
| | GSLSGRSDNHPGSPAGSPTSTEEGTSESATPESGPGTSTEPSEGSAPGSPAGSPTSTEE | |
| | GTSTEPSEGSAPGTSTEPSEGSAPGTSESATPESGPGSEPATSGSETPGSEPATSGSET | |
| | PGSPAGSPTSTEEGTSESATPESGPGTSTEPSEGSAPGTSTEPSEGSAPGSPAGSPTST | |
| | EEGTSTEPSEGSAPGTSTEPSEGSAPGTSESATPESGPGTSTEPSEGSAPGTSESATPE | |
| | SGPGSEPATSGSETPGTSTEPSEGSAPGTSTEPSEGSAPGTSESATPESGPGTSESATP | |
| | ESG | |
| 34 | TFGQGTKVEIKGAPCGAGCAGPCGPSPLGLAGSLSGRSDNHPGSPAGSPTSTEEGTSES | 650 |
| | ATPESGPGTSTEPSEGSAPGSPAGSPTSTEEGTSTEPSEGSAPGTSTEPSEGSAPGTSE | |
| | SATPESGPGSEPATSGSETPGSEPATSGSETPGSPAGSPTSTEEGTSESATPESGPGTS | |
| | TEPSEGSAPGTSTEPSEGSAPGSPAGSPTSTEEGTSTEPSEGSAPGTSTEPSEGSAPGT | |
| | SESATPESGPGTSTEPSEGSAPGTSESATPESGPGSEPATSGSETPGTSTEPSEGSAPG | |
| | TSTEPSEGSAPGTSESATPESGPGTSESATPESG | |
| 35 | TFGQGTKVEIKGSPGAGSCAGSPTSTEEGTSESACSPEGPGTSTEPSEGSCGPSPAGSP | 651 |
| | TSTEEGTCTEPSEGSAPGTSEPTCSGSAPGTSESATPESCGPSEPATSGSETPGSCAPT | |
| | SGSETPGSPAGSCTSTEEGTSESATPESCGPTESASGSPLGLAGSLSGRSDNHPGSPAG | |
| | SPTSTEEGTSESATPESGPGTSTEPSEGSAPGSPAGSPTSTEEGTSTEPSEGSAPGTST | |
| | EPSEGSAPGTSESATPESGPGSEPATSGSETPGSEPATSGSETPGSPAGSPTSTEEGTS | |
| | ESATPESGPGTSTEPSEGSAPGTSTEPSEGSAPGSPAGSPTSTEEGTSTEPSEGSAPGT | |
| | STEPSEGSAPGTSESATPESGPGTSTEPSEGSAPGTSESATPESGPGSEPATSGSETPG | |
| | TSTEPSEGSAPGTSTEPSEGSAPGTSESATPESGPGTSESATPESG | |
| 36 | TFGQGTKVEIKGSPGAGSCTETSPSTCPTESPEACGSGSGSPCSPSGTEACSTSGSEGC | 652 |
| | SPSSTAPCGPTETEGCTTSSGPPCPESATSEGSPLGLAGSLSGRSDNHPGSPAGSPTST | |
| | EEGTSESATPESGPGTSTEPSEGSAPGSPAGSPTSTEEGTSTEPSEGSAPGTSTEPSEG | |
| | SAPGTSESATPESGPGSEPATSGSETPGSEPATSGSETPGSPAGSPTSTEEGTSESATP | |
| | ESGPGTSTEPSEGSAPGTSTEPSEGSAPGSPAGSPTSTEEGTSTEPSEGSAPGTSTEPS | |
| | EGSAPGTSESATPESGPGTSTEPSEGSAPGTSESATPESGPGSEPATSGSETPGTSTEP | |
| | SEGSAPGTSTEPSEGSAPGTSESATPESGPGTSESATPESG | |
| 37 | TFGQGTKVEIKGSPGAGSCAGSPLGLSGRSDNHPGSPAGSPTSTEEGTSESATPESGPG | 653 |
| | TSTEPSEGSAPGSPAGSPTSTEEGTSTEPSEGSAPGTSTEPSEGSAPGTSESATPESGP | |
| | GSEPATSGSETPGSEPATSGSETPGSPAGSPTSTEEGTSESATPESGPGTSTEPSEGSA | |
| | PGTSTEPSEGSAPGSPAGSPTSTEEGTSTEPSEGSAPGTSTEPSEGSAPGTSESATPES | |
| | GPGTSTEPSEGSAPGTSESATPESGPGSEPATSGSETPGTSTEPSEGSAPGTSTEPSEG | |
| | SAPGTSESATPESGPGTSESATPESG | |
| 38 | TFGQGTKVEIKGAPCGASPLGLSGRSDNHPGSPAGSPTSTEEGTSESATPESGPGTSTE | 654 |
| | PSEGSAPGSPAGSPTSTEEGTSTEPSEGSAPGTSTEPSEGSAPGTSESATPESGPGSEP | |
| | ATSGSETPGSEPATSGSETPGSPAGSPTSTEEGTSESATPESGPGTSTEPSEGSAPGTS | |
| | TEPSEGSAPGSPAGSPTSTEEGTSTEPSEGSAPGTSTEPSEGSAPGTSESATPESGPGT | |
| | STEPSEGSAPGTSESATPESGPGSEPATSGSETPGTSTEPSEGSAPGTSTEPSEGSAPG | |
| | TSESATPESGPGTSESATPESG | |
| 39 | TFGQGTKVEIKGSPGAGSCAGSPTSTEEGTSESACSPEGPGTSTEPSEGSCGGSPLGLS | 655 |
| | GRSDNHPGSPAGSPTSTEEGTSESATPESGPGTSTEPSEGSAPGSPAGSPTSTEEGTST | |
| | EPSEGSAPGTSTEPSEGSAPGTSESATPESGPGSEPATSGSETPGSEPATSGSETPGSP | |
| | AGSPTSTEEGTSESATPESGPGTSTEPSEGSAPGTSTEPSEGSAPGSPAGSPTSTEEGT | |
| | STEPSEGSAPGTSTEPSEGSAPGTSESATPESGPGTSTEPSEGSAPGTSESATPESGPG | |
| | SEPATSGSETPGTSTEPSEGSAPGTSTEPSEGSAPGTSESATPESGPGTSESATPESG | |
| 40 | TFGQGTKVEIKGAPCGAGCAGPCGPSPLGLSGRSDNHPGSPAGSPTSTEEGTSESATPE | 656 |
| | SGPGTSTEPSEGSAPGSPAGSPTSTEEGTSTEPSEGSAPGTSTEPSEGSAPGTSESATP | |
| | ESGPGSEPATSGSETPGSEPATSGSETPGSPAGSPTSTEEGTSESATPESGPGTSTEPS | |
| | EGSAPGTSTEPSEGSAPGSPAGSPTSTEEGTSTEPSEGSAPGTSTEPSEGSAPGTSESA | |
| | TPESGPGTSTEPSEGSAPGTSESATPESGPGSEPATSGSETPGTSTEPSEGSAPGTSTE | |
| | PSEGSAPGTSESATPESGPGTSESATPESG | |
| 41 | TFGQGTKVEIKGSPGAGSCAGSPTSTEEGTSESACSPEGPGTSTEPSEGSCGPSPAGSP | 657 |
| | TSTEEGTCTEPSEGSAPGTSEPTCSGSAPGTSESATPESCGPSEPATSGSETPGSCAPT | |
| | SGSETPGSPAGSCTSTEEGTSESATPESCGPTESASGSPLGLSGRSDNHPGSPAGSPTS | |
| | TEEGTSESATPESGPGTSTEPSEGSAPGSPAGSPTSTEEGTSTEPSEGSAPGTSTEPSE | |
| | GSAPGTSESATPESGPGSEPATSGSETPGSEPATSGSETPGSPAGSPTSTEEGTSESAT | |
| | PESGPGTSTEPSEGSAPGTSTEPSEGSAPGSPAGSPTSTEEGTSTEPSEGSAPGTSTEP | |
| | SEGSAPGTSESATPESGPGTSTEPSEGSAPGTSESATPESGPGSEPATSGSETPGTSTE | |
| | PSEGSAPGTSTEPSEGSAPGTSESATPESGPGTSESATPESG | |
| 42 | TFGQGTKVEIKGSPGAGSCTETSPSTCPTESPEACGSGSGSPCSPSGTEACSTSGSEGC | 658 |
| | SPSSTAPCGPTETEGCTTSSGPPCPESATSEGSPLGLSGRSDNHPGSPAGSPTSTEEGT | |
| | SESATPESGPGTSTEPSEGSAPGSPAGSPTSTEEGTSTEPSEGSAPGTSTEPSEGSAPG | |
| | TSESATPESGPGSEPATSGSETPGSEPATSGSETPGSPAGSPTSTEEGTSESATPESGP | |
| | GTSTEPSEGSAPGTSTEPSEGSAPGSPAGSPTSTEEGTSTEPSEGSAPGTSTEPSEGSA | |
| | PGTSESATPESGPGTSTEPSEGSAPGTSESATPESGPGSEPATSGSETPGTSTEPSEGS | |
| | APGTSTEPSEGSAPGTSESATPESGPGTSESATPESG | |
| 43 | TFGQGTKVEIKGSPGAGSCAGLAGRSDNHVPLSLSMGPGSPAGSPTSTEEGTSESATPE | 659 |
| | SGPGTSTEPSEGSAPGSPAGSPTSTEEGTSTEPSEGSAPGTSTEPSEGSAPGTSESATP | |
| | ESGPGSEPATSGSETPGSEPATSGSETPGSPAGSPTSTEEGTSESATPESGPGTSTEPS | |
| | EGSAPGTSTEPSEGSAPGSPAGSPTSTEEGTSTEPSEGSAPGTSTEPSEGSAPGTSESA | |
| | TPESGPGTSTEPSEGSAPGTSESATPESGPGSEPATSGSETPGTSTEPSEGSAPGTSTE | |
| | PSEGSAPGTSESATPESGPGTSESATPESG | |
| 44 | TFGQGTKVEIKGAPCGALAGRSDNHVPLSLSMGPGSPAGSPTSTEEGTSESATPESGPG | 660 |
| | TSTEPSEGSAPGSPAGSPTSTEEGTSTEPSEGSAPGTSTEPSEGSAPGTSESATPESGP | |
| | GSEPATSGSETPGSEPATSGSETPGSPAGSPTSTEEGTSESATPESGPGTSTEPSEGSA | |
| | PGTSTEPSEGSAPGSPAGSPTSTEEGTSTEPSEGSAPGTSTEPSEGSAPGTSESATPES | |
| | GPGTSTEPSEGSAPGTSESATPESGPGSEPATSGSETPGTSTEPSEGSAPGTSTEPSEG | |
| | SAPGTSESATPESGPGTSESATPESG | |
| 45 | TFGQGTKVEIKGSPGAGSCAGSPTSTEEGTSESACSPEGPGTSTEPSEGSCGGLAGRSD | 661 |
| | NHVPLSLSMGPGSPAGSPTSTEEGTSESATPESGPGTSTEPSEGSAPGSPAGSPTSTEE | |
| | GTSTEPSEGSAPGTSTEPSEGSAPGTSESATPESGPGSEPATSGSETPGSEPATSGSET | |
| | PGSPAGSPTSTEEGTSESATPESGPGTSTEPSEGSAPGTSTEPSEGSAPGSPAGSPTST | |
| | EEGTSTEPSEGSAPGTSTEPSEGSAPGTSESATPESGPGTSTEPSEGSAPGTSESATPE | |
| | SGPGSEPATSGSETPGTSTEPSEGSAPGTSTEPSEGSAPGTSESATPESGPGTSESATP | |
| | ESG | |
| 46 | TFGQGTKVEIKGAPCGAGCAGPCGPLAGRSDNHVPLSLSMGPGSPAGSPTSTEEGTSES | 662 |
| | ATPESGPGTSTEPSEGSAPGSPAGSPTSTEEGTSTEPSEGSAPGTSTEPSEGSAPGTSE | |
| | SATPESGPGSEPATSGSETPGSEPATSGSETPGSPAGSPTSTEEGTSESATPESGPGTS | |
| | TEPSEGSAPGTSTEPSEGSAPGSPAGSPTSTEEGTSTEPSEGSAPGTSTEPSEGSAPGT | |
| | SESATPESGPGTSTEPSEGSAPGTSESATPESGPGSEPATSGSETPGTSTEPSEGSAPG | |
| | TSTEPSEGSAPGTSESATPESGPGTSESATPESG | |
| 47 | TFGQGTKVEIKGSPGAGSCAGSPTSTEEGTSESACSPEGPGTSTEPSEGSCGPSPAGSP | 663 |
| | TSTEEGTCTEPSEGSAPGTSEPTCSGSAPGTSESATPESCGPSEPATSGSETPGSCAPT | |
| | SGSETPGSPAGSCTSTEEGTSESATPESCGPTESASGLAGRSDNHVPLSLSMGPGSPAG | |
| | SPTSTEEGTSESATPESGPGTSTEPSEGSAPGSPAGSPTSTEEGTSTEPSEGSAPGTST | |
| | EPSEGSAPGTSESATPESGPGSEPATSGSETPGSEPATSGSETPGSPAGSPTSTEEGTS | |
| | ESATPESGPGTSTEPSEGSAPGTSTEPSEGSAPGSPAGSPTSTEEGTSTEPSEGSAPGT | |
| | STEPSEGSAPGTSESATPESGPGTSTEPSEGSAPGTSESATPESGPGSEPATSGSETPG | |
| | TSTEPSEGSAPGTSTEPSEGSAPGTSESATPESGPGTSESATPESG | |
| 48 | TEGQGTKVEIKGSPGAGSCTETSPSTCPTESPEACGSGSGSPCSPSGTEACSTSGSEGC | 664 |
| | SPSSTAPCGPTETEGCTTSSGPPCPESATSEGLAGRSDNHVPLSLSMGPGSPAGSPTST | |
| | EEGTSESATPESGPGTSTEPSEGSAPGSPAGSPTSTEEGTSTEPSEGSAPGTSTEPSEG | |
| | SAPGTSESATPESGPGSEPATSGSETPGSEPATSGSETPGSPAGSPTSTEEGTSESATP | |
| | ESGPGTSTEPSEGSAPGTSTEPSEGSAPGSPAGSPTSTEEGTSTEPSEGSAPGTSTEPS | |
| | EGSAPGTSESATPESGPGTSTEPSEGSAPGTSESATPESGPGSEPATSGSETPGTSTEP | |
| | SEGSAPGTSTEPSEGSAPGTSESATPESGPGTSESATPESG | |

*Sequence is the N- to C-terminus sequence of fusion of FR4-CCD-PCM-XTEN

TABLE 27
Concatenates of fusion protein components for targeted coniugate compositions

| | | SEQ ID |
|---|---|---|
| No. | Amino Acid Sequences of XTEN-PCM-CCD-FI21* | NO: |
| 1 | GTSESATPESGPGSEPATSGSETPGTSESATPESGPGSEPATSGSETPGTSESATPESG | 665 |
| | PGTSTEPSEGSAPGSPAGSPTSTEEGTSESATPESGPGSEPATSGSETPGTSESATPES | |
| | GPGSPAGSPTSTEEGSPAGSPTSTEEGTSTEPSEGSAPGTSESATPESGPGTSESATPE | |
| | SGPGTSESATPESGPGSEPATSGSETPGSEPATSGSETPGSPAGSPTSTEEGTSTEPSE | |
| | GSAPGTSTEPSEGSAPGSEPATSGSETPGTSESATPESGPGTSTEPSEGSAPGEVQLVE | |
| | SGGGLSGRSDNHSPLGLAGSGSPGAGSCAG | |
| 2 | GTSESATPESGPGSEPATSGSETPGTSESATPESGPGSEPATSGSETPGTSESATPESG | 666 |
| | PGTSTEPSEGSAPGSPAGSPTSTEEGTSESATPESGPGSEPATSGSETPGTSESATPES | |
| | GPGSPAGSPTSTEEGSPAGSPTSTEEGTSTEPSEGSAPGTSESATPESGPGTSESATPE | |
| | SGPGTSESATPESGPGSEPATSGSETPGSEPATSGSETPGSPAGSPTSTEEGTSTEPSE | |
| | GSAPGTSTEPSEGSAPGSEPATSGSETPGTSESATPESGPGTSTEPSEGSAPGDIQMTQ | |
| | SPSSSPLGLAGSLSGRSDNHGSPGAGSCAG | |
| 3 | GTSESATPESGPGSEPATSGSETPGTSESATPESGPGSEPATSGSETPGTSESATPESG | 667 |
| | PGTSTEPSEGSAPGSPAGSPTSTEEGTSESATPESGPGSEPATSGSETPGTSESATPES | |
| | GPGSPAGSPTSTEEGSPAGSPTSTEEGTSTEPSEGSAPGTSESATPESGPGTSESATPE | |
| | SGPGTSESATPESGPGSEPATSGSETPGSEPATSGSETPGSPAGSPTSTEEGTSTEPSE | |
| | GSAPGTSTEPSEGSAPGSEPATSGSETPGTSESATPESGPGTSTEPSEGSAPGSPLGLS | |
| | GRSDNHGSPGAGSCAG | |
| 4 | GTSESATPESGPGSEPATSGSETPGTSESATPESGPGSEPATSGSETPGTSESATPESG | 668 |
| | PGTSTEPSEGSAPGSPAGSPTSTEEGTSESATPESGPGSEPATSGSETPGTSESATPES | |
| | GPGSPAGSPTSTEEGSPAGSPTSTEEGTSTEPSEGSAPGTSESATPESGPGTSESATPE | |
| | SGPGTSESATPESGPGSEPATSGSETPGSEPATSGSETPGSPAGSPTSTEEGTSTEPSE | |
| | GSAPGTSTEPSEGSAPGSEPATSGSETPGTSESATPESGPGTSTEPSEGSAPGLAGRSD | |
| | NHVPLSLSMGGSPGAGSCAG | |
| 5 | GTSESATPESGPGSEPATSGSETPGTSESATPESGPGSEPATSGSETPGTSESATPESG | 669 |
| | PGTSTEPSEGSAPGSPAGSPTSTEEGTSESATPESGPGSEPATSGSETPGTSESATPES | |
| | GPGSPAGSPTSTEEGSPAGSPTSTEEGTSTEPSEGSAPGTSESATPESGPGTSESATPE | |
| | SGPGTSESATPESGPGSEPATSGSETPGSEPATSGSETPGSPAGSPTSTEEGTSTEPSE | |
| | GSAPGTSTEPSEGSAPGSEPATSGSETPGTSESATPESGPGTSTEPSEGSAPGLSGRSD | |
| | NHSPLGLAGSGAPCGA | |
| 6 | GTSESATPESGPGSEPATSGSETPGTSESATPESGPGSEPATSGSETPGTSESATPESG | 670 |
| | PGTSTEPSEGSAPGSPAGSPTSTEEGTSESATPESGPGSEPATSGSETPGTSESATPES | |
| | GPGSPAGSPTSTEEGSPAGSPTSTEEGTSTEPSEGSAPGTSESATPESGPGTSESATPE | |
| | SGPGTSESATPESGPGSEPATSGSETPGSEPATSGSETPGSPAGSPTSTEEGTSTEPSE | |
| | GSAPGTSTEPSEGSAPGSEPATSGSETPGTSESATPESGPGTSTEPSEGSAPGSPLGLA | |
| | GSLSGRSDNHGAPCGA | |
| 7 | GTSESATPESGPGSEPATSGSETPGTSESATPESGPGSEPATSGSETPGTSESATPESG | 671 |
| | PGTSTEPSEGSAPGSPAGSPTSTEEGTSESATPESGPGSEPATSGSETPGTSESATPES | |
| | GPGSPAGSPTSTEEGSPAGSPTSTEEGTSTEPSEGSAPGTSESATPESGPGTSESATPE | |
| | SGPGTSESATPESGPGSEPATSGSETPGSEPATSGSETPGSPAGSPTSTEEGTSTEPSE | |
| | GSAPGTSTEPSEGSAPGSEPATSGSETPGTSESATPESGPGTSTEPSEGSAPGSPLGLS | |
| | GRSDNHGAPCGA | |
| 8 | GTSESATPESGPGSEPATSGSETPGTSESATPESGPGSEPATSGSETPGTSESATPESG | 672 |
| | PGTSTEPSEGSAPGSPAGSPTSTEEGTSESATPESGPGSEPATSGSETPGTSESATPES | |
| | GPGSPAGSPTSTEEGSPAGSPTSTEEGTSTEPSEGSAPGTSESATPESGPGTSESATPE | |
| | SGPGTSESATPESGPGSEPATSGSETPGSEPATSGSETPGSPAGSPTSTEEGTSTEPSE | |
| | GSAPGTSTEPSEGSAPGSEPATSGSETPGTSESATPESGPGTSTEPSEGSAPGLAGRSD | |
| | NHVPLSLSMGGAPCGA | |
| 9 | GTSESATPESGPGSEPATSGSETPGTSESATPESGPGSEPATSGSETPGTSESATPESG | 673 |
| | PGTSTEPSEGSAPGSPAGSPTSTEEGTSESATPESGPGSEPATSGSETPGTSESATPES | |
| | GPGSPAGSPTSTEEGSPAGSPTSTEEGTSTEPSEGSAPGTSESATPESGPGTSESATPE | |
| | SGPGTSESATPESGPGSEPATSGSETPGSEPATSGSETPGSPAGSPTSTEEGTSTEPSE | |
| | GSAPGTSTEPSEGSAPGSEPATSGSETPGTSESATPESGPGTSTEPSEGSAPGLSGRSD | |
| | NHSPLGLAGSGSPGAGSCAGSPTSTEEGTSESACSPEGPGTSTEPSEGSCGG | |
| 10 | GTSESATPESGPGSEPATSGSETPGTSESATPESGPGSEPATSGSETPGTSESATPESG | 674 |
| | PGTSTEPSEGSAPGSPAGSPTSTEEGTSESATPESGPGSEPATSGSETPGTSESATPES | |
| | GPGSPAGSPTSTEEGSPAGSPTSTEEGTSTEPSEGSAPGTSESATPESGPGTSESATPE | |
| | SGPGTSESATPESGPGSEPATSGSETPGSEPATSGSETPGSPAGSPTSTEEGTSTEPSE | |
| | GSAPGTSTEPSEGSAPGSEPATSGSETPGTSESATPESGPGTSTEPSEGSAPGSPLGLA | |
| | GSLSGRSDNHGSPGAGSCAGSPTSTEEGTSESACSPEGPGTSTEPSEGSCGG | |
| 11 | GTSESATPESGPGSEPATSGSETPGTSESATPESGPGSEPATSGSETPGTSESATPESG | 675 |
| | PGTSTEPSEGSAPGSPAGSPTSTEEGTSESATPESGPGSEPATSGSETPGTSESATPES | |
| | GPGSPAGSPTSTEEGSPAGSPTSTEEGTSTEPSEGSAPGTSESATPESGPGTSESATPE | |
| | SGPGTSESATPESGPGSEPATSGSETPGSEPATSGSETPGSPAGSPTSTEEGTSTEPSE | |
| | GSAPGTSTEPSEGSAPGSEPATSGSETPGTSESATPESGPGTSTEPSEGSAPGSPLGLS | |
| | GRSDNHGSPGAGSCAGSPTSTEEGTSESACSPEGPGTSTEPSEGSCGG | |
| 12 | GTSESATPESGPGSEPATSGSETPGTSESATPESGPGSEPATSGSETPGTSESATPESG | 676 |
| | PGTSTEPSEGSAPGSPAGSPTSTEEGTSESATPESGPGSEPATSGSETPGTSESATPES | |
| | GPGSPAGSPTSTEEGSPAGSPTSTEEGTSTEPSEGSAPGTSESATPESGPGTSESATPE | |
| | SGPGTSESATPESGPGSEPATSGSETPGSEPATSGSETPGSPAGSPTSTEEGTSTEPSE | |
| | GSAPGTSTEPSEGSAPGSEPATSGSETPGTSESATPESGPGTSTEPSEGSAPGLAGRSD | |
| | NHVPLSLSMGGSPGAGSCAGSPTSTEEGTSESACSPEGPGTSTEPSEGSCGG | |
| 13 | GTSESATPESGPGSEPATSGSETPGTSESATPESGPGSEPATSGSETPGTSESATPESG | 677 |
| | PGTSTEPSEGSAPGSPAGSPTSTEEGTSESATPESGPGSEPATSGSETPGTSESATPES | |
| | GPGSPAGSPTSTEEGSPAGSPTSTEEGTSTEPSEGSAPGTSESATPESGPGTSESATPE | |
| | SGPGTSESATPESGPGSEPATSGSETPGSEPATSGSETPGSPAGSPTSTEEGTSTEPSE | |
| | GSAPGTSTEPSEGSAPGSEPATSGSETPGTSESATPESGPGTSTEPSEGSAPGLSGRSD | |
| | NHSPLGLAGSGAPCGAGCAGPCGP | |
| 14 | GTSESATPESGPGSEPATSGSETPGTSESATPESGPGSEPATSGSETPGTSESATPESG | 678 |
| | PGTSTEPSEGSAPGSPAGSPTSTEEGTSESATPESGPGSEPATSGSETPGTSESATPES | |
| | GPGSPAGSPTSTEEGSPAGSPTSTEEGTSTEPSEGSAPGTSESATPESGPGTSESATPE | |
| | SGPGTSESATPESGPGSEPATSGSETPGSEPATSGSETPGSPAGSPTSTEEGTSTEPSE | |
| | GSAPGTSTEPSEGSAPGSEPATSGSETPGTSESATPESGPGTSTEPSEGSAPGSPLGLA | |
| | GSLSGRSDNHGAPCGAGCAGPCGP | |
| 15 | GTSESATPESGPGSEPATSGSETPGTSESATPESGPGSEPATSGSETPGTSESATPESG | 679 |
| | PGTSTEPSEGSAPGSPAGSPTSTEEGTSESATPESGPGSEPATSGSETPGTSESATPES | |
| | GPGSPAGSPTSTEEGSPAGSPTSTEEGTSTEPSEGSAPGTSESATPESGPGTSESATPE | |
| | SGPGTSESATPESGPGSEPATSGSETPGSEPATSGSETPGSPAGSPTSTEEGTSTEPSE | |
| | GSAPGTSTEPSEGSAPGSEPATSGSETPGTSESATPESGPGTSTEPSEGSAPGSPLGLS | |
| | GRSDNHGAPCGAGCAGPCGP | |
| 16 | GTSESATPESGPGSEPATSGSETPGTSESATPESGPGSEPATSGSETPGTSESATPESG | 680 |
| | PGTSTEPSEGSAPGSPAGSPTSTEEGTSESATPESGPGSEPATSGSETPGTSESATPES | |
| | GPGSPAGSPTSTEEGSPAGSPTSTEEGTSTEPSEGSAPGTSESATPESGPGTSESATPE | |
| | SGPGTSESATPESGPGSEPATSGSETPGSEPATSGSETPGSPAGSPTSTEEGTSTEPSE | |
| | GSAPGTSTEPSEGSAPGSEPATSGSETPGTSESATPESGPGTSTEPSEGSAPGLAGRSD | |
| | NHVPLSLSMGGAPCGAGCAGPCGP | |
| 17 | GTSESATPESGPGSEPATSGSETPGTSESATPESGPGSEPATSGSETPGTSESATPESG | 681 |
| | PGTSTEPSEGSAPGSPAGSPTSTEEGTSESATPESGPGSEPATSGSETPGTSESATPES | |
| | GPGSPAGSPTSTEEGSPAGSPTSTEEGTSTEPSEGSAPGTSESATPESGPGTSESATPE | |
| | SGPGTSESATPESGPGSEPATSGSETPGSEPATSGSETPGSPAGSPTSTEEGTSTEPSE | |
| | GSAPGTSTEPSEGSAPGSEPATSGSETPGTSESATPESGPGTSTEPSEGSAPGLSGRSD | |
| | NHSPLGLAGSGSPGAGSCAGSPTSTEEGTSESACSPEGPGTSTEPSEGSCGPSPAGSPT | |
| | STEEGTCTEPSEGSAPGTSEPTCSGSAPGTSESATPESCGPSEPATSGSETPGSCAPTS | |
| | GSETPGSPAGSCTSTEEGTSESATPESCGPTESASG | |
| 18 | GTSESATPESGPGSEPATSGSETPGTSESATPESGPGSEPATSGSETPGTSESATPESG | 682 |
| | PGTSTEPSEGSAPGSPAGSPTSTEEGTSESATPESGPGSEPATSGSETPGTSESATPES | |
| | GPGSPAGSPTSTEEGSPAGSPTSTEEGTSTEPSEGSAPGTSESATPESGPGTSESATPE | |
| | SGPGTSESATPESGPGSEPATSGSETPGSEPATSGSETPGSPAGSPTSTEEGTSTEPSE | |
| | GSAPGTSTEPSEGSAPGSEPATSGSETPGTSESATPESGPGTSTEPSEGSAPGSPLGLA | |
| | GSLSGRSDNHGSPGAGSCAGSPTSTEEGTSESACSPEGPGTSTEPSEGSCGPSPAGSPT | |
| | STEEGTCTEPSEGSAPGTSEPTCSGSAPGTSESATPESCGPSEPATSGSETPGSCAPTS | |
| | GSETPGSPAGSCTSTEEGTSESATPESCGPTESASG | |
| 19 | GTSESATPESGPGSEPATSGSETPGTSESATPESGPGSEPATSGSETPGTSESATPESG | 683 |
| | PGTSTEPSEGSAPGSPAGSPTSTEEGTSESATPESGPGSEPATSGSETPGTSESATPES | |
| | GPGSPAGSPTSTEEGSPAGSPTSTEEGTSTEPSEGSAPGTSESATPESGPGTSESATPE | |
| | SGPGTSESATPESGPGSEPATSGSETPGSEPATSGSETPGSPAGSPTSTEEGTSTEPSE | |
| | GSAPGTSTEPSEGSAPGSEPATSGSETPGTSESATPESGPGTSTEPSEGSAPGSPLGLS | |
| | GRSDNHGSPGAGSCAGSPTSTEEGTSESACSPEGPGTSTEPSEGSCGPSPAGSPTSTEE | |
| | GTCTEPSEGSAPGTSEPTCSGSAPGTSESATPESCGPSEPATSGSETPGSCAPTSGSET | |
| | PGSPAGSCTSTEEGTSESATPESCGPTESASG | |
| 20 | GTSESATPESGPGSEPATSGSETPGTSESATPESGPGSEPATSGSETPGTSESATPESG | 684 |
| | PGTSTEPSEGSAPGSPAGSPTSTEEGTSESATPESGPGSEPATSGSETPGTSESATPES | |
| | GPGSPAGSPTSTEEGSPAGSPTSTEEGTSTEPSEGSAPGTSESATPESGPGTSESATPE | |
| | SGPGTSESATPESGPGSEPATSGSETPGSEPATSGSETPGSPAGSPTSTEEGTSTEPSE | |
| | GSAPGTSTEPSEGSAPGSEPATSGSETPGTSESATPESGPGTSTEPSEGSAPGLAGRSD | |
| | NHVPLSLSMGGSPGAGSCAGSPTSTEEGTSESACSPEGPGTSTEPSEGSCGPSPAGSPT | |
| | STEEGTCTEPSEGSAPGTSEPTCSGSAPGTSESATPESCGPSEPATSGSETPGSCAPTS | |
| | GSETPGSPAGSCTSTEEGTSESATPESCGPTESASG | |
| 21 | GTSESATPESGPGSEPATSGSETPGTSESATPESGPGSEPATSGSETPGTSESATPESG | 685 |
| | PGTSTEPSEGSAPGSPAGSPTSTEEGTSESATPESGPGSEPATSGSETPGTSESATPES | |
| | GPGSPAGSPTSTEEGSPAGSPTSTEEGTSTEPSEGSAPGTSESATPESGPGTSESATPE | |
| | SGPGTSESATPESGPGSEPATSGSETPGSEPATSGSETPGSPAGSPTSTEEGTSTEPSE | |
| | GSAPGTSTEPSEGSAPGSEPATSGSETPGTSESATPESGPGTSTEPSEGSAPGLSGRSD | |
| | NHSPLGLAGSGSPGAGSCTETSPSTCPTESPEACGSGSGSPCSPSGTEACSTSGSEGCS | |
| | PSSTAPCGPTETEGCTTSSGPPCPESATSEG | |
| 22 | GTSESATPESGPGSEPATSGSETPGTSESATPESGPGSEPATSGSETPGTSESATPESG | 686 |
| | PGTSTEPSEGSAPGSPAGSPTSTEEGTSESATPESGPGSEPATSGSETPGTSESATPES | |
| | GPGSPAGSPTSTEEGSPAGSPTSTEEGTSTEPSEGSAPGTSESATPESGPGTSESATPE | |
| | SGPGTSESATPESGPGSEPATSGSETPGSEPATSGSETPGSPAGSPTSTEEGTSTEPSE | |
| | GSAPGTSTEPSEGSAPGSEPATSGSETPGTSESATPESGPGTSTEPSEGSAPGSPLGLA | |
| | GSLSGRSDNHGSPGAGSCTETSPSTCPTESPEACGSGSGSPCSPSGTEACSTSGSEGCS | |
| | PSSTAPCGPTETEGCTTSSGPPCPESATSEG | |
| 23 | GTSESATPESGPGSEPATSGSETPGTSESATPESGPGSEPATSGSETPGTSESATPESG | 687 |
| | PGTSTEPSEGSAPGSPAGSPTSTEEGTSESATPESGPGSEPATSGSETPGTSESATPES | |
| | GPGSPAGSPTSTEEGSPAGSPTSTEEGTSTEPSEGSAPGTSESATPESGPGTSESATPE | |
| | SGPGTSESATPESGPGSEPATSGSETPGSEPATSGSETPGSPAGSPTSTEEGTSTEPSE | |
| | GSAPGTSTEPSEGSAPGSEPATSGSETPGTSESATPESGPGTSTEPSEGSAPGSPLGLS | |
| | GRSDNHGSPGAGSCTETSPSTCPTESPEACGSGSGSPCSPSGTEACSTSGSEGCSPSST | |
| | APCGPTETEGCTTSSGPPCPESATSEG | |
| 24 | GTSESATPESGPGSEPATSGSETPGTSESATPESGPGSEPATSGSETPGTSESATPESG | 688 |
| | PGTSTEPSEGSAPGSPAGSPTSTEEGTSESATPESGPGSEPATSGSETPGTSESATPES | |
| | GPGSPAGSPTSTEEGSPAGSPTSTEEGTSTEPSEGSAPGTSESATPESGPGTSESATPE | |
| | SGPGTSESATPESGPGSEPATSGSETPGSEPATSGSETPGSPAGSPTSTEEGTSTEPSE | |
| | GSAPGTSTEPSEGSAPGSEPATSGSETPGTSESATPESGPGTSTEPSEGSAPGLAGRSD | |
| | NHVPLSLSMGGSPGAGSCTETSPSTCPTESPEACGSGSGSPCSPSGTEACSTSGSEGCS | |
| | PSSTAPCGPTETEGCTTSSGPPCPESATSEG | |
| 25 | GTSESATPESGPGSEPATSGSETPGTSESATPESGPGSEPATSGSETPGTSESATPESG | 689 |
| | PGTSTEPSEGSAPGSPAGSPTSTEEGTSESATPESGPGSEPATSGSETPGTSESATPES | |
| | GPGSPAGSPTSTEEGSPAGSPTSTEEGTSTEPSEGSAPGTSESATPESGPGTSESATPE | |
| | SGPGTSESATPESGPGSEPATSGSETPGSEPATSGSETPGSPAGSPTSTEEGTSTEPSE | |
| | GSAPGTSTEPSEGSAPGSEPATSGSETPGTSESATPESGPGTSTEPSEGSAPGLSGRSD | |
| | NHSPLGLAGSGSPGAGSCAG | |
| 26 | GTSESATPESGPGSEPATSGSETPGTSESATPESGPGSEPATSGSETPGTSESATPESG | 690 |
| | PGTSTEPSEGSAPGSPAGSPTSTEEGTSESATPESGPGSEPATSGSETPGTSESATPES | |
| | GPGSPAGSPTSTEEGSPAGSPTSTEEGTSTEPSEGSAPGTSESATPESGPGTSESATPE | |
| | SGPGTSESATPESGPGSEPATSGSETPGSEPATSGSETPGSPAGSPTSTEEGTSTEPSE | |
| | GSAPGTSTEPSEGSAPGSEPATSGSETPGTSESATPESGPGTSTEPSEGSAPGSPLGLA | |
| | GSLSGRSDNHGSPGAGSCAG | |
| 27 | GTSESATPESGPGSEPATSGSETPGTSESATPESGPGSEPATSGSETPGTSESATPESG | 691 |
| | PGTSTEPSEGSAPGSPAGSPTSTEEGTSESATPESGPGSEPATSGSETPGTSESATPES | |
| | GPGSPAGSPTSTEEGSPAGSPTSTEEGTSTEPSEGSAPGTSESATPESGPGTSESATPE | |
| | SGPGTSESATPESGPGSEPATSGSETPGSEPATSGSETPGSPAGSPTSTEEGTSTEPSE | |
| | GSAPGTSTEPSEGSAPGSEPATSGSETPGTSESATPESGPGTSTEPSEGSAPGSPLGLS | |
| | GRSDNHGSPGAGSCAG | |
| 28 | GTSESATPESGPGSEPATSGSETPGTSESATPESGPGSEPATSGSETPGTSESATPESG | 692 |
| | PGTSTEPSEGSAPGSPAGSPTSTEEGTSESATPESGPGSEPATSGSETPGTSESATPES | |
| | GPGSPAGSPTSTEEGSPAGSPTSTEEGTSTEPSEGSAPGTSESATPESGPGTSESATPE | |
| | SGPGTSESATPESGPGSEPATSGSETPGSEPATSGSETPGSPAGSPTSTEEGTSTEPSE | |
| | GSAPGTSTEPSEGSAPGSEPATSGSETPGTSESATPESGPGTSTEPSEGSAPGLAGRSD | |
| | NHVPLSLSMGGSPGAGSCAG | |
| 29 | GTSESATPESGPGSEPATSGSETPGTSESATPESGPGSEPATSGSETPGTSESATPESG | 693 |
| | PGTSTEPSEGSAPGSPAGSPTSTEEGTSESATPESGPGSEPATSGSETPGTSESATPES | |
| | GPGSPAGSPTSTEEGSPAGSPTSTEEGTSTEPSEGSAPGTSESATPESGPGTSESATPE | |
| | SGPGTSESATPESGPGSEPATSGSETPGSEPATSGSETPGSPAGSPTSTEEGTSTEPSE | |
| | GSAPGTSTEPSEGSAPGSEPATSGSETPGTSESATPESGPGTSTEPSEGSAPGLSGRSD | |
| | NHSPLGLAGSGAPCGA | |
| 30 | GTSESATPESGPGSEPATSGSETPGTSESATPESGPGSEPATSGSETPGTSESATPESG | 694 |
| | PGTSTEPSEGSAPGSPAGSPTSTEEGTSESATPESGPGSEPATSGSETPGTSESATPES | |
| | GPGSPAGSPTSTEEGSPAGSPTSTEEGTSTEPSEGSAPGTSESATPESGPGTSESATPE | |
| | SGPGTSESATPESGPGSEPATSGSETPGSEPATSGSETPGSPAGSPTSTEEGTSTEPSE | |
| | GSAPGTSTEPSEGSAPGSEPATSGSETPGTSESATPESGPGTSTEPSEGSAPGSPLGLA | |
| | GSLSGRSDNHGAPCGA | |
| 31 | GTSESATPESGPGSEPATSGSETPGTSESATPESGPGSEPATSGSETPGTSESATPESG | 695 |
| | PGTSTEPSEGSAPGSPAGSPTSTEEGTSESATPESGPGSEPATSGSETPGTSESATPES | |
| | GPGSPAGSPTSTEEGSPAGSPTSTEEGTSTEPSEGSAPGTSESATPESGPGTSESATPE | |
| | SGPGTSESATPESGPGSEPATSGSETPGSEPATSGSETPGSPAGSPTSTEEGTSTEPSE | |
| | GSAPGTSTEPSEGSAPGSEPATSGSETPGTSESATPESGPGTSTEPSEGSAPGSPLGLS | |
| | GRSDNHGAPCGA | |
| 32 | GTSESATPESGPGSEPATSGSETPGTSESATPESGPGSEPATSGSETPGTSESATPESG | 696 |
| | PGTSTEPSEGSAPGSPAGSPTSTEEGTSESATPESGPGSEPATSGSETPGTSESATPES | |
| | GPGSPAGSPTSTEEGSPAGSPTSTEEGTSTEPSEGSAPGTSESATPESGPGTSESATPE | |
| | SGPGTSESATPESGPGSEPATSGSETPGSEPATSGSETPGSPAGSPTSTEEGTSTEPSE | |
| | GSAPGTSTEPSEGSAPGSEPATSGSETPGTSESATPESGPGTSTEPSEGSAPGLAGRSD | |
| | NHVPLSLSMGGAPCGA | |
| 33 | GTSESATPESGPGSEPATSGSETPGTSESATPESGPGSEPATSGSETPGTSESATPESG | 697 |
| | PGTSTEPSEGSAPGSPAGSPTSTEEGTSESATPESGPGSEPATSGSETPGTSESATPES | |
| | GPGSPAGSPTSTEEGSPAGSPTSTEEGTSTEPSEGSAPGTSESATPESGPGTSESATPE | |
| | SGPGTSESATPESGPGSEPATSGSETPGSEPATSGSETPGSPAGSPTSTEEGTSTEPSE | |
| | GSAPGTSTEPSEGSAPGSEPATSGSETPGTSESATPESGPGTSTEPSEGSAPGLSGRSD | |
| | NHSPLGLAGSGSPGAGSCAGSPTSTEEGTSESACSPEGPGTSTEPSEGSCGG | |
| 34 | GTSESATPESGPGSEPATSGSETPGTSESATPESGPGSEPATSGSETPGTSESATPESG | 698 |
| | PGTSTEPSEGSAPGSPAGSPTSTEEGTSESATPESGPGSEPATSGSETPGTSESATPES | |
| | GPGSPAGSPTSTEEGSPAGSPTSTEEGTSTEPSEGSAPGTSESATPESGPGTSESATPE | |
| | SGPGTSESATPESGPGSEPATSGSETPGSEPATSGSETPGSPAGSPTSTEEGTSTEPSE | |
| | GSAPGTSTEPSEGSAPGSEPATSGSETPGTSESATPESGPGTSTEPSEGSAPGSPLGLA | |
| | GSLSGRSDNHGSPGAGSCAGSPTSTEEGTSESACSPEGPGTSTEPSEGSCGG | |
| 35 | GTSESATPESGPGSEPATSGSETPGTSESATPESGPGSEPATSGSETPGTSESATPESG | 699 |
| | PGTSTEPSEGSAPGSPAGSPTSTEEGTSESATPESGPGSEPATSGSETPGTSESATPES | |
| | GPGSPAGSPTSTEEGSPAGSPTSTEEGTSTEPSEGSAPGTSESATPESGPGTSESATPE | |
| | SGPGTSESATPESGPGSEPATSGSETPGSEPATSGSETPGSPAGSPTSTEEGTSTEPSE | |
| | GSAPGTSTEPSEGSAPGSEPATSGSETPGTSESATPESGPGTSTEPSEGSAPGSPLGLS | |
| | GRSDNHGSPGAGSCAGSPTSTEEGTSESACSPEGPGTSTEPSEGSCGG | |
| 36 | GTSESATPESGPGSEPATSGSETPGTSESATPESGPGSEPATSGSETPGTSESATPESG | 700 |
| | PGTSTEPSEGSAPGSPAGSPTSTEEGTSESATPESGPGSEPATSGSETPGTSESATPES | |
| | GPGSPAGSPTSTEEGSPAGSPTSTEEGTSTEPSEGSAPGTSESATPESGPGTSESATPE | |
| | SGPGTSESATPESGPGSEPATSGSETPGSEPATSGSETPGSPAGSPTSTEEGTSTEPSE | |
| | GSAPGTSTEPSEGSAPGSEPATSGSETPGTSESATPESGPGTSTEPSEGSAPGLAGRSD | |
| | NHVPLSLSMGGSPGAGSCAGSPTSTEEGTSESACSPEGPGTSTEPSEGSCGG | |
| 37 | GTSESATPESGPGSEPATSGSETPGTSESATPESGPGSEPATSGSETPGTSESATPESG | 701 |
| | PGTSTEPSEGSAPGSPAGSPTSTEEGTSESATPESGPGSEPATSGSETPGTSESATPES | |
| | GPGSPAGSPTSTEEGSPAGSPTSTEEGTSTEPSEGSAPGTSESATPESGPGTSESATPE | |
| | SGPGTSESATPESGPGSEPATSGSETPGSEPATSGSETPGSPAGSPTSTEEGTSTEPSE | |
| | GSAPGTSTEPSEGSAPGSEPATSGSETPGTSESATPESGPGTSTEPSEGSAPGLSGRSD | |
| | NHSPLGLAGSGAPCGAGCAGPCGP | |
| 38 | GTSESATPESGPGSEPATSGSETPGTSESATPESGPGSEPATSGSETPGTSESATPESG | 702 |
| | PGTSTEPSEGSAPGSPAGSPTSTEEGTSESATPESGPGSEPATSGSETPGTSESATPES | |
| | GPGSPAGSPTSTEEGSPAGSPTSTEEGTSTEPSEGSAPGTSESATPESGPGTSESATPE | |
| | SGPGTSESATPESGPGSEPATSGSETPGSEPATSGSETPGSPAGSPTSTEEGTSTEPSE | |
| | GSAPGTSTEPSEGSAPGSEPATSGSETPGTSESATPESGPGTSTEPSEGSAPGSPLGLA | |
| | GSLSGRSDNHGAPCGAGCAGPCGP | |
| 39 | GTSESATPESGPGSEPATSGSETPGTSESATPESGPGSEPATSGSETPGTSESATPESG | 703 |
| | PGTSTEPSEGSAPGSPAGSPTSTEEGTSESATPESGPGSEPATSGSETPGTSESATPES | |
| | GPGSPAGSPTSTEEGSPAGSPTSTEEGTSTEPSEGSAPGTSESATPESGPGTSESATPE | |
| | SGPGTSESATPESGPGSEPATSGSETPGSEPATSGSETPGSPAGSPTSTEEGTSTEPSE | |
| | GSAPGTSTEPSEGSAPGSEPATSGSETPGTSESATPESGPGTSTEPSEGSAPGSPLGLS | |
| | GRSDNHGAPCGAGCAGPCGP | |
| 40 | GTSESATPESGPGSEPATSGSETPGTSESATPESGPGSEPATSGSETPGTSESATPESG | 704 |
| | PGTSTEPSEGSAPGSPAGSPTSTEEGTSESATPESGPGSEPATSGSETPGTSESATPES | |
| | GPGSPAGSPTSTEEGSPAGSPTSTEEGTSTEPSEGSAPGTSESATPESGPGTSESATPE | |
| | SGPGTSESATPESGPGSEPATSGSETPGSEPATSGSETPGSPAGSPTSTEEGTSTEPSE | |
| | GSAPGTSTEPSEGSAPGSEPATSGSETPGTSESATPESGPGTSTEPSEGSAPGLAGRSD | |
| | NHVPLSLSMGGAPCGAGCAGPCGP | |
| 41 | GTSESATPESGPGSEPATSGSETPGTSESATPESGPGSEPATSGSETPGTSESATPESG | 705 |
| | PGTSTEPSEGSAPGSPAGSPTSTEEGTSESATPESGPGSEPATSGSETPGTSESATPES | |
| | GPGSPAGSPTSTEEGSPAGSPTSTEEGTSTEPSEGSAPGTSESATPESGPGTSESATPE | |
| | SGPGTSESATPESGPGSEPATSGSETPGSEPATSGSETPGSPAGSPTSTEEGTSTEPSE | |
| | GSAPGTSTEPSEGSAPGSEPATSGSETPGTSESATPESGPGTSTEPSEGSAPGLSGRSD | |
| | NHSPLGLAGSGSPGAGSCAGSPTSTEEGTSESACSPEGPGTSTEPSEGSCGPSPAGSPT | |
| | STEEGTCTEPSEGSAPGTSEPTCSGSAPGTSESATPESCGPSEPATSGSETPGSCAPTS | |
| | GSETPGSPAGSCTSTEEGTSESATPESCGPTESASG | |
| 42 | GTSESATPESGPGSEPATSGSETPGTSESATPESGPGSEPATSGSETPGTSESATPESG | 706 |
| | PGTSTEPSEGSAPGSPAGSPTSTEEGTSESATPESGPGSEPATSGSETPGTSESATPES | |
| | GPGSPAGSPTSTEEGSPAGSPTSTEEGTSTEPSEGSAPGTSESATPESGPGTSESATPE | |
| | SGPGTSESATPESGPGSEPATSGSETPGSEPATSGSETPGSPAGSPTSTEEGTSTEPSE | |
| | GSAPGTSTEPSEGSAPGSEPATSGSETPGTSESATPESGPGTSTEPSEGSAPGSPLGLA | |
| | GSLSGRSDNHGSPGAGSCAGSPTSTEEGTSESACSPEGPGTSTEPSEGSCGPSPAGSPT | |
| | STEEGTCTEPSEGSAPGTSEPTCSGSAPGTSESATPESCGPSEPATSGSETPGSCAPTS | |
| | GSETPGSPAGSCTSTEEGTSESATPESCGPTESASG | |
| 43 | GTSESATPESGPGSEPATSGSETPGTSESATPESGPGSEPATSGSETPGTSESATPESG | 707 |
| | PGTSTEPSEGSAPGSPAGSPTSTEEGTSESATPESGPGSEPATSGSETPGTSESATPES | |
| | GPGSPAGSPTSTEEGSPAGSPTSTEEGTSTEPSEGSAPGTSESATPESGPGTSESATPE | |
| | SGPGTSESATPESGPGSEPATSGSETPGSEPATSGSETPGSPAGSPTSTEEGTSTEPSE | |
| | GSAPGTSTEPSEGSAPGSEPATSGSETPGTSESATPESGPGTSTEPSEGSAPGSPLGLS | |
| | GRSDNHGSPGAGSCAGSPTSTEEGTSESACSPEGPGTSTEPSEGSCGPSPAGSPTSTEE | |
| | GTCTEPSEGSAPGTSEPTCSGSAPGTSESATPESCGPSEPATSGSETPGSCAPTSGSET | |
| | PGSPAGSCTSTEEGTSESATPESCGPTESASG | |
| 44 | GTSESATPESGPGSEPATSGSETPGTSESATPESGPGSEPATSGSETPGTSESATPESG | 708 |
| | PGTSTEPSEGSAPGSPAGSPTSTEEGTSESATPESGPGSEPATSGSETPGTSESATPES | |
| | GPGSPAGSPTSTEEGSPAGSPTSTEEGTSTEPSEGSAPGTSESATPESGPGTSESATPE | |
| | SGPGTSESATPESGPGSEPATSGSETPGSEPATSGSETPGSPAGSPTSTEEGTSTEPSE | |
| | GSAPGTSTEPSEGSAPGSEPATSGSETPGTSESATPESGPGTSTEPSEGSAPGLAGRSD | |
| | NHVPLSLSMGGSPGAGSCAGSPTSTEEGTSESACSPEGPGTSTEPSEGSCGPSPAGSPT | |
| | STEEGTCTEPSEGSAPGTSEPTCSGSAPGTSESATPESCGPSEPATSGSETPGSCAPTS | |
| | GSETPGSPAGSCTSTEEGTSESATPESCGPTESASG | |
| 45 | GTSESATPESGPGSEPATSGSETPGTSESATPESGPGSEPATSGSETPGTSESATPESG | 709 |
| | PGTSTEPSEGSAPGSPAGSPTSTEEGTSESATPESGPGSEPATSGSETPGTSESATPES | |
| | GPGSPAGSPTSTEEGSPAGSPTSTEEGTSTEPSEGSAPGTSESATPESGPGTSESATPE | |
| | SGPGTSESATPESGPGSEPATSGSETPGSEPATSGSETPGSPAGSPTSTEEGTSTEPSE | |
| | GSAPGTSTEPSEGSAPGSEPATSGSETPGTSESATPESGPGTSTEPSEGSAPGLSGRSD | |
| | NHSPLGLAGSGSPGAGSCTETSPSTCPTESPEACGSGSGSPCSPSGTEACSTSGSEGCS | |
| | PSSTAPCGPTETEGCTTSSGPPCPESATSEG | |
| 46 | GTSESATPESGPGSEPATSGSETPGTSESATPESGPGSEPATSGSETPGTSESATPESG | 710 |
| | PGTSTEPSEGSAPGSPAGSPTSTEEGTSESATPESGPGSEPATSGSETPGTSESATPES | |
| | GPGSPAGSPTSTEEGSPAGSPTSTEEGTSTEPSEGSAPGTSESATPESGPGTSESATPE | |
| | SGPGTSESATPESGPGSEPATSGSETPGSEPATSGSETPGSPAGSPTSTEEGTSTEPSE | |
| | GSAPGTSTEPSEGSAPGSEPATSGSETPGTSESATPESGPGTSTEPSEGSAPGSPLGLA | |
| | GSLSGRSDNHGSPGAGSCTETSPSTCPTESPEACGSGSGSPCSPSGTEACSTSGSEGCS | |
| | PSSTAPCGPTETEGCTTSSGPPCPESATSEG | |
| 47 | GTSESATPESGPGSEPATSGSETPGTSESATPESGPGSEPATSGSETPGTSESATPESG | 711 |
| | PGTSTEPSEGSAPGSPAGSPTSTEEGTSESATPESGPGSEPATSGSETPGTSESATPES | |
| | GPGSPAGSPTSTEEGSPAGSPTSTEEGTSTEPSEGSAPGTSESATPESGPGTSESATPE | |
| | SGPGTSESATPESGPGSEPATSGSETPGSEPATSGSETPGSPAGSPTSTEEGTSTEPSE | |
| | GSAPGTSTEPSEGSAPGSEPATSGSETPGTSESATPESGPGTSTEPSEGSAPGSPLGLS | |
| | GRSDNHGSPGAGSCTETSPSTCPTESPEACGSGSGSPCSPSGTEACSTSGSEGCSPSST | |
| | APCGPTETEGCTTSSGPPCPESATSEG | |
| 48 | GTSESATPESGPGSEPATSGSETPGTSESATPESGPGSEPATSGSETPGTSESATPESG | 712 |
| | PGTSTEPSEGSAPGSPAGSPTSTEEGTSESATPESGPGSEPATSGSETPGTSESATPES | |
| | GPGSPAGSPTSTEEGSPAGSPTSTEEGTSTEPSEGSAPGTSESATPESGPGTSESATPE | |
| | SGPGTSESATPESGPGSEPATSGSETPGSEPATSGSETPGSPAGSPTSTEEGTSTEPSE | |
| | GSAPGTSTEPSEGSAPGSEPATSGSETPGTSESATPESGPGTSTEPSEGSAPGLAGRSD | |
| | NHVPLSLSMGGSPGAGSCTETSPSTCPTESPEACGSGSGSPCSPSGTEACSTSGSEGCS | |
| | PSSTAPCGPTETEGCTTSSGPPCPESATSEG | |

*Sequence is the N- to C-terminus sequence of fusion of XTEN-PCM-CCD-FR1*

[0463] The following are examples of compositions, methods, and treatment regimens of the invention. It is understood that various other embodiments may be practiced, given the general description provided above.

### EXAMPLES

### Example 1

### Construction of XTEN_AE864

[0464] XTEN_AE864 was constructed from serial dimerization of XTEN_AE36 to AE72, 144, 288, 576 and 864. A collection of XTEN_AE72 segments was constructed from 37 different segments of XTEN_AE36. Cultures of E. coli harboring all 37 different 36-amino acid segments were mixed and plasmid was isolated. This plasmid pool was digested with BsaI/NcoI to generate the small fragment as the insert. The same plasmid pool was digested with BbsI/NcoI to generate the large fragment as the vector. The insert and vector fragments were ligated resulting in a doubling of the length and the ligation mixture was transformed into BL21Gold(DE3) cells to obtain colonies of XTEN_AE72.

[0465] This library of XTEN_AE72 segments was designated LCW0406. All clones from LCW0406 were combined and dimerized again using the same process as described above yielding library LCW0410 of XTEN_AE144. All clones from LCW0410 were combined and dimerized again using the same process as described above yielding library LCW0414 of XTEN_AE288. Two isolates LCW0414.001 and LCW0414.002 were randomly picked from the library and sequenced to verify the identities. All clones from LCW0414 were combined and dimerized again using the same process as described above yielding library LCW0418 of XTEN_AE576. We screened 96 isolates from library LCW0418 for high level of GFP fluorescence. 8 isolates with right sizes of inserts by PCR and strong fluorescence were sequenced and 2 isolates (LCW0418.018 and LCW0418.052) were chosen for future use based on sequencing and expression data.

[0466] The specific clone pCW0432 of XTEN_AE864 was constructed by combining LCW0418.018 of XTEN_AE576 and LCW0414.002 of XTEN_AE288 using the same dimerization process as described above.

### Example 2

### Construction of XTEN_AG864

[0467] Using the several consecutive rounds of dimerization, we assembled a collection of XTEN_AG864 sequences starting from segments of XTEN_AD36. The methods and materials utilized were adapted from those of Example 1, above. These sequences were assembled and several isolates from XTEN_AG864 were evaluated and found to show good expression and excellent solubility under physiological conditions. A full length clone of XTEN_AG864 had excellent solubility and showed half-life exceeding 60 h in cynomolgus monkeys.

### Example 3

### Construction of CXTEN (1xAmino, 3xThiol-XTEN864)

[0468] PCR reaction was performed on plasmid pYS0072 with pairs of primers T7 promoter& SASRSABsaIrev-AACG (“SASRSA” disclosed as SEQ ID NO: 218), CH-AE864BsaIfor-AACG&AE432-Cl2BbsIrev2 and Cl2-AE432BsaIfor2&AE_003SbfIrev to obtain the PCR products of CI1, CI2 and AE-SbfI. Gel-purify the bands of right sizes and digest with the corresponding suitable restriction enzymes as the inserts.

[0469] Digest plasmid pYS0072 with NdeI/SbfI and gel-purify the large fragment as the vector. Ligate the vector with inserts above and transform into DH5α competent cells to screen by sequencing confirmation for the right clone of pCW1305, which encodes the protein of HD2-R-XTEN_AE864 (C12, C432, C854)-R-H8. The DNA sequences and protein sequences are provided in the Table 28, below.

TABLE 28
DNA and amino acid sequence for CXTEN (1xAmino, 3-Thio-XTEN864)

| Clone | | |
|---|---|---|
| Name | DNA Sequence | Amino Acid Sequence |
| N-term- | ATGAAAAACCCAGAGCAAGCAGAAGAACAAGCTGA | MKNPEQAEEQAEEQR |
| HD2-R- | AGAACAGCGCGAAGAAACAagcgcgtctcgttccgctGGGTC | EETSASRSAGSPTAEA |
| AE864_ | TCCAACGGCAGAAGCCGCTGGCtgcGGTACTGCTGAA | AGCGTAEAATSESATP |
| 3Cys-R- | GCGGCAACCTCTGAATCCGCTACTCCAGAATCCGGT | ESGPGTSTEPSEGSAP |
| H8 | CCTGGTACTAGCACTGAGCCAAGCGAAGGTTCTGCT | GSPAGSPTSTEEGTST |
| | CCAGGCTCCCCGGCAGGTAGCCCTACCTCTACCGAA | EPSEGSAPGTSTEPSEG |
| | GAGGGCACTAGCACCGAACCATCTGAGGGTTCCGCT | SAPGTSESATPESGPG |
| | CCTGGCACCTCCACTGAACCGTCCGAAGGCAGTGCT | SEPATSGSETPGSEPAT |
| | CCGGGTACTTCCGAAAGCGCAACTCCGGAATCCGGC | SGSETPGSPAGSPTSTE |
| | CCTGGTTCTGAGCCTGCTACTTCCGGCTCTGAAACTC | EGTSESATPESGPGTS |
| | CAGGTAGCGAGCCAGCGACTTCTGGTTCTGAAACTC | TEPSEGSAPGTSTEPSE |
| | CAGGTTCACCGGCGGGTAGCCCGACGAGCACGGAG | GSAPGSPAGSPTSTEE |
| | GAAGGTACCTCTGAGTCGGCCACTCCTGAGTCCGGT | GTSTEPSEGSAPGTST |
| | CCGGGCACGAGCACCGAGCCGAGCGAGGGTTCAGC | EPSEGSAPGTSESATPE |
| | CCCGGGTACCAGCACGGAGCCGTCCGAGGGTAGCG | SGPGTSTEPSEGSAPG |
| | CACCGGGTTCTCCGGCGGGCTCCCCTACGTCTACGG | TSESATPESGPGSEPAT |
| | AAGAGGGTACGTCCACTGAACCTAGCGAGGGCAGC | SGSETPGTSTEPSEGSA |
| | GCGCCAGGCACCAGCACTGAACCGAGCGAAGGCAG | PGTSTEPSEGSAPGTSE |
| | CGCACCTGGCACTAGCGAGTCTGCGACTCCGGAGAG | SATPESGPGTSESATPE |
| | CGGTCCGGGTACGAGCACGGAACCAAGCGAAGGCA | SGPGSPAGSPTSTEEG |
| | GCGCCCCAGGTACCTCTGAATCTGCTACCCCAGAAT | TSESATPESGPGSEPAT |
| | CTGGCCCGGGTTCCGAGCCAGCTACCTCTGGTTCTG | SGSETPGTSESATPESG |
| | AAACCCCAGGTACTTCCACTGAACCAAGCGAAGGT | PGTSTEPSEGSAPGTST |
| | AGCGCTCCTGGCACTTCTACTGAACCATCCGAAGGT | EPSEGSAPGTSTEPSEG |
| | TCCGCTCCTGGTACGTCTGAAAGCGCTACCCCTGAA | SAPGTSTEPSEGSAPG |
| | AGCGGCCCAGGCACCTCTGAAAGCGCTACTCCTGAG | TSTEPSEGSAPGTSTEP |
| | AGCGGTCCAGGCTCTCCAGCAGGTTCTCCAACCTCC | SEGSAPGSPAGSPTST |
| | ACTGAAGAAGGCACCTCTGAGTCTGCTACCCCTGAA | EETAEAAGCGTAEAA |
| | TCTGGTCCTGGCTCCGAACCTGCTACCTCTGGTTCCG | TSESATPESGPGSEPAT |
| | AAACTCCAGGTACCTCGGAATCTGCGACTCCGGAAT | SGSETPGTSESATPESG |
| | CTGGCCCGGGCACGAGCACGGAGCCGTCTGAGGGT | PGSEPATSGSETPGTSE |
| | AGCGCACCAGGTACCAGCACTGAGCCTTCTGAGGGC | SATPESGPGTSTEPSEG |
| | TCTGCACCGGGTACCTCCACGGAACCTTCGGAAGGT | SAPGTSESATPESGPG |
| | TCTGCGCCGGGTACCTCCACTGAGCCATCCGAGGGT | SPAGSPTSTEEGSPAG |
| | TCAGCACCAGGTACTAGCACGGAACCGTCCGAGGG | SPTSTEEGSPAGSPTST |
| | CTCTGCACCAGGTACGAGCACCGAACCGTCGGAGG | EEGTSESATPESGPGT |
| | GTAGCGCTCCAGGTAGCCCAGCGGGCTCTCCGACAA | STEPSEGSAPGTSESAT |
| | GCACCGAAGAAACCGCTGAAGCCGCAGGTtgtGGCAC | PESGPGSEPATSGSETP |
| | TGCGGAAGCTGCAACAAGCGAGAGCGCGACTCCTG | GTSESATPESGPGSEP |
| | AATCTGGTCCGGGTAGCGAGCCTGCAACCAGCGGTT | ATSGSETPGTSESATP |
| | CTGAGACGCCGGGCACTTCCGAATCTGCGACCCCGG | ESGPGTSTEPSEGSAP |
| | AGTCCGGTCCAGGTTCAGAGCCGGCGACGAGCGGTT | GSPAGSPTSTEEGTSES |
| | CGGAAACGCCGGGTACGTCTGAATCAGCCACGCCG | ATPESGPGSEPATSGS |
| | GAGTCTGGTCCGGGTACCTCGACCGAACCAAGCGA | ETPGTSESATPESGPGS |
| | AGGTTCGGCACCGGGTACTAGCGAGAGCGCAACCC | PAGSPTSTEEGSPAGS |
| | CTGAAAGCGGTCCGGGCAGCCCGGCAGGTTCTCCAA | PTSTEEGTSTEPSEGSA |
| | CCAGCACCGAAGAAGGTTCCCCTGCTGGTAGCCCGA | PGTSESATPESGPGTSE |
| | CCTCTACGGAGGAAGGTAGCCCTGCAGGTTCCCCAA | SATPESGPGTSESATPE |
| | CTTCTACTGAGGAAGGTACTTCTGAGTCCGCTACCC | SGPGSEPATSGSETPG |
| | CAGAAAGCGGTCCTGGTACCTCCACTGAACCGTCTG | SEPATSGSETPGSPAG |
| | AAGGCTCTGCACCAGGCACTTCTGAGTCTGCTACTC | SPTSTEEGTSTEPSEGS |
| | CAGAAAGCGGCCCAGGTTCTGAACCAGCAACTTCTG | APGTSTEPSEGSAPGS |
| | GCTCTGAGACTCCAGGCACTTCTGAGTCCGCAACGC | EPATSGSETPGSTAEA |
| | CTGAATCCGGTCCTGGTTCTGAACCAGCTACTTCCG | AGCGTAEAASASRSA |
| | GCAGCGAAACCCCAGGTACCTCTGAGTCTGCGACTC | HHHHHHHH (SEQ ID |
| | CAGAGTCTGGTCCTGGTACTTCCACTGAGCCTAGCG | NO: 714) |
| | AGGGTTCCGCACCAGGTTCTCCGGCTGGTAGCCCGA | |
| | CCAGCACGGAGGAGGGTACGTCTGAATCTGCAACG | |
| | CCGGAATCGGGCCCAGGTTCGGAGCCTGCAACGTCT | |
| | GGCAGCGAAACCCCGGGTACCTCCGAATCTGCTACA | |
| | CCGGAAAGCGGTCCTGGCAGCCCTGCTGGTTCTCCA | |
| | ACCTCTACCGAGGAGGGTTCACCGGCAGGTAGCCCG | |
| | ACTAGCACTGAAGAAGGTACTAGCACGGAGCCGAG | |
| | CGAGGGTAGTGCTCCGGGTACGAGCGAGAGCGCAA | |
| | CGCCAGAGAGCGGTCCAGGCACCAGCGAATCGGCC | |
| | ACCCCTGAGAGCGGCCCAGGTACTTCTGAGAGCGCC | |
| | ACTCCTGAATCCGGCCCTGGTAGCGAGCCGGCAACC | |
| | TCCGGCTCAGAAACTCCTGGTTCGGAACCAGCGACC | |
| | AGCGGTTCTGAAACTCCGGGTAGCCCGGCAGGCAG | |
| | CCCAACGAGCACCGAAGAGGGTACCAGCACGGAAC | |
| | CGAGCGAGGGTTCTGCCCCGGGTACTTCCACCGAAC | |
| | CATCGGAGGGCTCTGCACCTGGTAGCGAACCTGCGA | |
| | CGTCTGGTTCTGAAACGCCGGGTAgCACTGCAGAAG | |
| | CGGCTGGTtgtGGCACCGCCGAAGCAGCTagcgcctctcgct | |
| | ccgcaCATCACCATCACCACCATCATCACTAA (SEQ ID | |
| | NO: 713) | |

### Example 4

### Construction of CCD-XTEN

[0470] A pair of primers AE_003BsaIBbsIfor-TGGT&AE712-MycAgeIrev was used to run PCR on pCW1470 to obtain the PCR product of BsaIBbsI-AE712. Gel-purify the band of right size and digest with BsaI/AgeI as the insert. Ligate the insert with BsaI/AgeI digested pNL0322 vector and transform into DH5α competent cells to screen for the right clone of pCW1471 as the vector next cloning step.

[0471] A pair of primers AE42_3CBsaIfor& AE42BsaIrev-TGGT was used to run PCR on pCW1466 to obtain the PCR product of AGGT-AE42-TGGT. Gel-purify the band of right size and digest with BsaI as the insert. Digest pCW1471 above with BsaI/BbsI and gel-purify the large fragment as the vector. Ligate the vector with insert and transform into DH5α competent cells to screen by sequencing confirmation for the right clone of pCW1472 (AC1255), which encodes the protein of HD2-R-XTEN_AE42 (C8, C24, C40)-XTEN_AE712-R-Myc-H8. The DNA sequences and protein sequences are provided in the Table 29 below.

TABLE 29
DNA and amino acid sequence for 1xAmino, 3xThio-XTEN42-XTEN712

| Clone | | Amino Acid |
|---|---|---|
| Name | DNA Sequence | Sequence |
| HD2-R- | ATGAAAAACCCAGAGCAAGCAGAAGAACAAGCTGA | MKNPEQAEEQAEE |
| AE42_ | AGAACAGCGCGAAGAAACAagcgcgtctcgtGGGTCTCCAg | QREETSASRGSPGA |
| 3Cys- | gtgcAGGTAGCtgcGCTGGTAGCCCAACCTCTACCGAAG | GSCAGSPTSTEEGT |
| AE712- | AAGGTACCTCTGAATCCGCTtgTTCCCCAGAAGGTCCT | SESACSPEGPGTSTE |
| R-myc- | GGTACTAGCACTGAGCCAAGCGAAGGTTCTtgTGGCgg | PSEGSCGGPGSPAG |
| H8 | tCCtGGTAGCCCAGCTGGTAGCCCAACCTCTACCGAA | SPTSTEEGTSESATP |
| | GAAGGTACCTCTGAATCCGCTACTCCAGAATCCGGTC | ESGPGTSTEPSEGS |
| | CTGGTACTAGCACTGAGCCAAGCGAAGGTTCTGCTC | APGSPAGSPTSTEE |
| | CAGGCTCCCCGGCAGGTAGCCCTACCTCTACCGAAG | GTSTEPSEGSAPGT |
| | AGGGCACTAGCACCGAACCATCTGAGGGTTCCGCTC | STEPSEGSAPGTSES |
| | CTGGCACCTCCACTGAACCGTCCGAAGGCAGTGCTC | ATPESGPGSEPATS |
| | CGGGTACTTCCGAAAGCGCAACTCCGGAATCCGGCC | GSETPGSEPATSGS |
| | CTGGTTCTGAGCCTGCTACTTCCGGCTCTGAAACTCC | ETPGSPAGSPTSTEE |
| | AGGTAGCGAGCCAGCGACTTCTGGTTCTGAAACTCC | GTSESATPESGPGT |
| | AGGTTCACCGGCGGGTAGCCCGACGAGCACGGAGGA | STEPSEGSAPGTSTE |
| | AGGTACCTCTGAGTCGGCCACTCCTGAGTCCGGTCCG | PSEGSAPGSPAGSP |
| | GGCACGAGCACCGAGCCGAGCGAGGGTTCAGCCCCG | TSTEEGTSTEPSEGS |
| | GGTACCAGCACGGAGCCGTCCGAGGGTAGCGCACCG | APGTSTEPSEGSAP |
| | GGTTCTCCGGCGGGCTCCCCTACGTCTACGGAAGAG | GTSESATPESGPGT |
| | GGTACGTCCACTGAACCTAGCGAGGGCAGCGCGCCA | STEPSEGSAPGTSES |
| | GGCACCAGCACTGAACCGAGCGAAGGCAGCGCACCT | ATPESGPGSEPATS |
| | GGCACTAGCGAGTCTGCGACTCCGGAGAGCGGTCCG | GSETPGTSTEPSEGS |
| | GGTACGAGCACGGAACCAAGCGAAGGCAGCGCCCC | APGTSTEPSEGSAP |
| | AGGTACCTCTGAATCTGCTACCCCAGAATCTGGCCCG | GTSESATPESGPGT |
| | GGTTCCGAGCCAGCTACCTCTGGTTCTGAAACCCCAG | SESATPESGPGSPA |
| | GTACTTCCACTGAACCAAGCGAAGGTAGCGCTCCTG | GSPTSTEEGTSESAT |
| | GCACTTCTACTGAACCATCCGAAGGTTCCGCTCCTGG | PESGPGSEPATSGSE |
| | TACGTCTGAAAGCGCTACCCCTGAAAGCGGCCCAGG | TPGTSESATPESGP |
| | CACCTCTGAAAGCGCTACTCCTGAGAGCGGTCCAGG | GTSTEPSEGSAPGT |
| | CTCTCCAGCAGGTTCTCCAACCTCCACTGAAGAAGGC | STEPSEGSAPGTSTE |
| | ACCTCTGAGTCTGCTACCCCTGAATCTGGTCCTGGCT | PSEGSAPGTSTEPSE |
| | CCGAACCTGCTACCTCTGGTTCCGAAACTCCAGGTAC | GSAPGTSTEPSEGS |
| | CTCGGAATCTGCGACTCCGGAATCTGGCCCGGGCAC | APGTSTEPSEGSAP |
| | GAGCACGGAGCCGTCTGAGGGTAGCGCACCAGGTAC | GSPAGSPTSTEEGT |
| | CAGCACTGAGCCTTCTGAGGGCTCTGCACCGGGTAC | STEPSEGSAPGTSES |
| | CTCCACGGAACCTTCGGAAGGTTCTGCGCCGGGTAC | ATPESGPGSEPATS |
| | CTCCACTGAGCCATCCGAGGGTTCAGCACCAGGTAC | GSETPGTSESATPES |
| | TAGCACGGAACCGTCCGAGGGCTCTGCACCAGGTAC | GPGSEPATSGSETP |
| | GAGCACCGAACCGTCGGAGGGTAGCGCTCCAGGTAG | GTSESATPESGPGT |
| | CCCAGCGGGCTCTCCGACAAGCACCGAAGAAGGCAC | STEPSEGSAPGTSES |
| | CAGCACCGAGCCGTCCGAAGGTTCCGCACCAGGTAC | ATPESGPGSPAGSP |
| | AAGCGAGAGCGCGACTCCTGAATCTGGTCCGGGTAG | TSTEEGSPAGSPTST |
| | CGAGCCTGCAACCAGCGGTTCTGAGACGCCGGGCAC | EEGSPAGSPTSTEE |
| | TTCCGAATCTGCGACCCCGGAGTCCGGTCCAGGTTCA | GTSESATPESGPGT |
| | GAGCCGGCGACGAGCGGTTCGGAAACGCCGGGTACG | STEPSEGSAPGTSES |
| | TCTGAATCAGCCACGCCGGAGTCTGGTCCGGGTACCT | ATPESGPGSEPATS |
| | CGACCGAACCAAGCGAAGGTTCGGCACCGGGTACTA | GSETPGTSESATPES |
| | GCGAGAGCGCAACCCCTGAAAGCGGTCCGGGCAGCC | GPGSEPATSGSETP |
| | CGGCAGGTTCTCCAACCAGCACCGAAGAAGGTTCCC | GTSESATPESGPGT |
| | CTGCTGGTAGCCCGACCTCTACGGAGGAAGGTAGCC | STEPSEGSAPGSPA |
| | CTGCAGGTTCCCCAACTTCTACTGAGGAAGGTACTTC | GSPTSTEEGTSESAT |
| | TGAGTCCGCTACCCCAGAAAGCGGTCCTGGTACCTCC | PESGPGSEPATSGSE |
| | ACTGAACCGTCTGAAGGCTCTGCACCAGGCACTTCTG | TPGTSESATPESGP |
| | AGTCTGCTACTCCAGAAAGCGGCCCAGGTTCTGAAC | GSPAGSPTSTEEGSP |
| | CAGCAACTTCTGGCTCTGAGACTCCAGGCACTTCTGA | ASASRSAEQKLISE |
| | GTCCGCAACGCCTGAATCCGGTCCTGGTTCTGAACCA | EDLSPATGHHHHH |
| | GCTACTTCCGGCAGCGAAACCCCAGGTACCTCTGAG | HHH (SEQ ID NO: |
| | TCTGCGACTCCAGAGTCTGGTCCTGGTACTTCCACTG | 716) |
| | AGCCTAGCGAGGGTTCCGCACCAGGTTCTCCGGCTG | |
| | GTAGCCCGACCAGCACGGAGGAGGGTACGTCTGAAT | |
| | CTGCAACGCCGGAATCGGGCCCAGGTTCGGAGCCTG | |
| | CAACGTCTGGCAGCGAAACCCCGGGTACCTCCGAAT | |
| | CTGCTACACCGGAAAGCGGTCCTGGCAGCCCTGCTG | |
| | GTTCTCCAACCTCTACCGAGGAGGGTTCACCGGCAag | |
| | cgcctctcgctccgcaGAACAGAAACTGATCTCTGAAGAGGA | |
| | TCTGtctccggctaccggtCATCACCATCACCACCATCATCAC | |
| | TAA (SEQ ID NO: 715) | |

### Example 5

### Construction of CCD-PCM-XTEN

[0472] A pair of primers 4Afor&AE712HindIIIrev was used to run the PCR reaction on plasmid pCW1464 containing PCM-XTEN_AE712-H8 to obtain the PCR product of AE712 without Histidines. Gel-purify the band of right size and digest with SbfI/HindIII as the insert. Digest pCW1464 with BsaI/HindIII and gel-purify the large fragment as the vector. Ligate the vector with the previously BsaI/SbfI digested XTEN fragment from pCW1330 and SbfI/HindIII digested PCR insert of XTEN_AE712. Transform into DH5α competent cells to obtain the colonies of pCW1469 and screen for the right clone by sequencing confirmation as the vector in next cloning step.

[0473] A pair of primers TEV-AE42_3CNheIfor&AE42_3CBsaIrev was used to run PCR on pCW1466 to obtain the PCR product of TEV-AE42_3C. Gel-purify the band of right size and digest with NheI/BsaI as the insert. Digest plasmid pCW1469 above with NdeI/BsaI and gel-purify the large fragment as the vector. Ligate the vector with the annealed oligonucleotides of HD2-H8NheIfor&rev and the NheI/BsaI digested PCR insert of TEV-AE42_3C. Transform into DH5α competent cells to screen by sequencing confirmation for the right clone of pCW1470 (AC1254), which encodes the protein of HD2-His8-TEV-XTEN_AE42 (C8, C24, C40)-PCM-XTEN_AE712 (“His8” disclosed as SEQ ID NO: 721). The DNA sequences and protein sequences are provided in the Table 30, below.

TABLE 30
DNA and amino acid sequence for 1xAmino, 3xThio-XTEN42-PCM-XTEN712

| Clone | | Amino Acid |
|---|---|---|
| Name | DNA Sequence | Sequence |
| HD2-H8- | ATGAAAAACCCAGAGCAAGCAGAAGAACAAGCTGA | MKNPEQAEEQAEE |
| TEV- | AGAACAGCGCGAAGAAACACACCATCACCATCATCA | QREETHHHHHHHH |
| AE42_ | CCACCATtctgctagccgaccgctGAAAATCTGTATTTTCAGG | SASRSAENLYFQGS |
| 3Cys-PCM- | GcTCTCCAggtgcAGGTAGCtgcGCTGGTAGCCCAACCTC | PGAGSCAGSPTSTE |
| AE712 | TACCGAAGAAGGTACCTCTGAATCCGCTtgTTCCCCA | EGTSESACSPEGPG |
| | GAAGGTCCTGGTACTAGCACTGAGCCAAGCGAAGGT | TSTEPSEGSCGGLS |
| | TCTtgTGGCggtctgtCAggtCGTtctGATaacCATtccCCActgGG | GRSDNHSPLGLAGS |
| | TctgGCTGGGTCTCCAGGTAGCCCAGCTGGTAGCCCAA | PGSPAGSPTSTEEG |
| | CCTCTACCGAAGAAGGTACCTCTGAATCCGCTACTCC | TSESATPESGPGTST |
| | AGAATCCGGTCCTGGTACTAGCACTGAGCCAAGCGA | EPSEGSAPGSPAGS |
| | AGGTTCTGCTCCAGGCTCCCCGGCAGGTAGCCCTACC | PTSTEEGTSTEPSEG |
| | TCTACCGAAGAGGGCACTAGCACCGAACCATCTGAG | SAPGTSTEPSEGSAP |
| | GGTTCCGCTCCTGGCACCTCCACTGAACCGTCCGAAG | GTSESATPESGPGS |
| | GCAGTGCTCCGGGTACTTCCGAAAGCGCAACTCCGG | EPATSGSETPGSEP |
| | AATCCGGCCCTGGTTCTGAGCCTGCTACTTCCGGCTC | ATSGSETPGSPAGS |
| | TGAAACTCCAGGTAGCGAGCCAGCGACTTCTGGTTCT | PTSTEEGTSESATPE |
| | GAAACTCCAGGTTCACCGGCGGGTAGCCCGACGAGC | SGPGTSTEPSEGSAP |
| | ACGGAGGAAGGTACCTCTGAGTCGGCCACTCCTGAG | GTSTEPSEGSAPGSP |
| | TCCGGTCCGGGCACGAGCACCGAGCCGAGCGAGGGT | AGSPTSTEEGTSTEP |
| | TCAGCCCCGGGTACCAGCACGGAGCCGTCCGAGGGT | SEGSAPGTSTEPSE |
| | AGCGCACCGGGTTCTCCGGCGGGCTCCCCTACGTCTA | GSAPGTSESATPES |
| | CGGAAGAGGGTACGTCCACTGAACCTAGCGAGGGCA | GPGTSTEPSEGSAP |
| | GCGCGCCAGGCACCAGCACTGAACCGAGCGAAGGCA | GTSESATPESGPGS |
| | GCGCACCTGGCACTAGCGAGTCTGCGACTCCGGAGA | EPATSGSETPGTSTE |
| | GCGGTCCGGGTACGAGCACGGAACCAAGCGAAGGC | PSEGSAPGTSTEPSE |
| | AGCGCCCCAGGTACCTCTGAATCTGCTACCCCAGAAT | GSAPGTSESATPES |
| | CTGGCCCGGGTTCCGAGCCAGCTACCTCTGGTTCTGA | GPGTSESATPESGP |
| | AACCCCAGGTACTTCCACTGAACCAAGCGAAGGTAG | GSPAGSPTSTEEGT |
| | CGCTCCTGGCACTTCTACTGAACCATCCGAAGGTTCC | SESATPESGPGSEPA |
| | GCTCCTGGTACGTCTGAAAGCGCTACCCCTGAAAGC | TSGSETPGTSESATP |
| | GGCCCAGGCACCTCTGAAAGCGCTACTCCTGAGAGC | ESGPGTSTEPSEGS |
| | GGTCCAGGCTCTCCAGCAGGTTCTCCAACCTCCACTG | APGTSTEPSEGSAP |
| | AAGAAGGCACCTCTGAGTCTGCTACCCCTGAATCTG | GTSTEPSEGSAPGT |
| | GTCCTGGCTCCGAACCTGCTACCTCTGGTTCCGAAAC | STEPSEGSAPGTSTE |
| | TCCAGGTACCTCGGAATCTGCGACTCCGGAATCTGGC | PSEGSAPGTSTEPSE |
| | CCGGGCACGAGCACGGAGCCGTCTGAGGGTAGCGCA | GSAPGSPAGSPTST |
| | CCAGGTACCAGCACTGAGCCTTCTGAGGGCTCTGCA | EEGTSTEPSEGSAP |
| | CCGGGTACCTCCACGGAACCTTCGGAAGGTTCTGCG | GTSESATPESGPGS |
| | CCGGGTACCTCCACTGAGCCATCCGAGGGTTCAGCA | EPATSGSETPGTSES |
| | CCAGGTACTAGCACGGAACCGTCCGAGGGCTCTGCA | ATPESGPGSEPATS |
| | CCAGGTACGAGCACCGAACCGTCGGAGGGTAGCGCT | GSETPGTSESATPES |
| | CCAGGTAGCCCAGCGGGCTCTCCGACAAGCACCGAA | GPGTSTEPSEGSAP |
| | GAAGGCACCAGCACCGAGCCGTCCGAAGGTTCCGCA | GTSESATPESGPGSP |
| | CCAGGTACAAGCGAGAGCGCGACTCCTGAATCTGGT | AGSPTSTEEGSPAG |
| | CCGGGTAGCGAGCCTGCAACCAGCGGTTCTGAGACG | SPTSTEEGSPAGSPT |
| | CCGGGCACTTCCGAATCTGCGACCCCGGAGTCCGGT | STEEGTSESATPESG |
| | CCAGGTTCAGAGCCGGCGACGAGCGGTTCGGAAACG | PGTSTEPSEGSAPG |
| | CCGGGTACGTCTGAATCAGCCACGCCGGAGTCTGGT | TSESATPESGPGSEP |
| | CCGGGTACCTCGACCGAACCAAGCGAAGGTTCGGCA | ATSGSETPGTSESA |
| | CCGGGTACTAGCGAGAGCGCAACCCCTGAAAGCGGT | TPESGPGSEPATSGS |
| | CCGGGCAGCCCGGCAGGTTCTCCAACCAGCACCGAA | ETPGTSESATPESGP |
| | GAAGGTTCCCCTGCTGGTAGCCCGACCTCTACGGAG | GTSTEPSEGSAPGSP |
| | GAAGGTAGCCCTGCAGGTTCCCCAACTTCTACTGAG | AGSPTSTEEGTSES |
| | GAAGGTACTTCTGAGTCCGCTACCCCAGAAAGCGGT | ATPESGPGSEPATS |
| | CCTGGTACCTCCACTGAACCGTCTGAAGGCTCTGCAC | GSETPGTSESATPES |
| | CAGGCACTTCTGAGTCTGCTACTCCAGAAAGCGGCC | GPGSPAGSPTSTEE |
| | CAGGTTCTGAACCAGCAACTTCTGGCTCTGAGACTCC | GSPA (SEQ ID NO: |
| | AGGCACTTCTGAGTCCGCAACGCCTGAATCCGGTCCT | 718) |
| | GGTTCTGAACCAGCTACTTCCGGCAGCGAAACCCCA | |
| | GGTACCTCTGAGTCTGCGACTCCAGAGTCTGGTCCTG | |
| | GTACTTCCACTGAGCCTAGCGAGGGTTCCGCACCAG | |
| | GTTCTCCGGCTGGTAGCCCGACCAGCACGGAGGAGG | |
| | GTACGTCTGAATCTGCAACGCCGGAATCGGGCCCAG | |
| | GTTCGGAGCCTGCAACGTCTGGCAGCGAAACCCCGG | |
| | GTACCTCCGAATCTGCTACACCGGAAAGCGGTCCTG | |
| | GCAGCCCTGCTGGTTCTCCAACCTCTACCGAGGAGG | |
| | GTTCACCGGCATAA (SEQ ID NO: 717) | |

### Example 6

### Fermentation of XTEN for Conjugation

[0474] Starter cultures were prepared by inoculating glycerol stocks of E. coli carrying the plasmid containing the appropriate XTEN for conjugation protein sequences into 125 mL of LB Broth media containing 50 μg/mL kanamycin. The cultures were then shaken overnight at 37° C. The starter culture was used to inoculate 2 L of fermentation batch media containing −12.5 g ammonium sulfate, 15 g potassium phosphate dibasic anhydrous, 2.5 g sodium citrate dihydrate; 8.5 g sodium phosphate monobasic monohydrate; 50 g NZ BL4 soy peptone (Kerry Bioscience #5X00043); 25 g yeast extract (Teknova #Y9020); 1.8 L water; 0.5 mL polypropylene glycol; 2.5 mL trace elements solution (Amunix recipe 144-1); 17.5 mL 1M magnesium sulfate; and 2 mL Kanamycin (50 mg/mL)—in 5 L glass jacketed vessel with a B. Braun Biostat B controller. The fermentation control settings were: pH=6.9+/−0.1; dO2=10%; dissolved oxygen cascade in stirrer only mode with a range of 125-1180 rpm; air flow of 5 liters per minute of 90% oxygen; initial temperature 37° C.; base control 13% ammonium hydroxide; and no acid control. After 6 hours of culture a 50% glucose feed was initiated at a rate of 30 g/hr. After 20 hours of culture, 25 mL of 1M magnesium sulfate and 3 mL of 1M IPTG were added. After a total fermentation run time of 45 hours the culture was harvested by centrifugation yielding cell pellets between 0.45-1.1 kilograms in wet weight for all constructs. The pellets were stored frozen at −80° C. until further use. Culture samples at multiple time points in the fermentation were taken, the cells were lysed, then cell debris was flocculated with heat and rapid cooling, clarified soluble lysates were prepared by centrifugation and analyzed by a regular non-reducing SDS-PAGE using NuPAGE 4-12% Bis-Tris gel from Invitrogen according to manufacturer's specifications with Coomassie staining Results show an accumulation of XTEN fusion protein as a function of fermentation run time and that the XTEN fusion protein constructs were expressed at fermentation scale with titers >1 g/L, with an apparent MW of about 160 kDa (note: the actual molecular weight are 100 kDa. The observed migration in SDS-PAGE was comparable to that observed for other XTEN-containing fusion proteins).

### Example 7

### Purification of CCD-XTEN from High-Density Bacterial Fermentation

[0475] 1. Expression

[0476] The construct AC1255 (MKNPEQAEEQAEEQREET-SASRGS-CCD1-XTEN_AE713-SASRSA-Myc-His8) (“MKNPEQAEEQAEEQREET,” “SASRGS,” “SASRSA,” and “His8” disclosed as SEQ ID NOS 719-720, 218, and 721, respectively) was expressed in E. coli BL21_DE3 under the control of T7 RNA polymerase. AC1255 was cultured in a LB flask until OD600 of ˜2.5 and transferred into a 10 L fermenter containing a rich medium with 2.1 g/L glucose. After batch feed exhaustion, 70% w/v glucose was added in a pre-programmed glucose limited profile. The culture was induced with IPTG at 40-50 OD600 then cultured for 18-24 hours until harvest. The cells were pelleted by centrifugation and frozen at −80° C.

[0477] 2. Lysis and Clarification

[0478] The cell pellet (2600 g) was resuspended in 7400 ml of 50 mM citrate, pH 4.0. The resuspended cells were heated to 80° C. for 15 minutes, followed by rapid cooling on ice for 30 minutes. pH of the lysate was adjusted to 3.0 with 12 M HCl, and the lysate was stored overnight at pH 3.0 with stirring at 4° C. The lysate was then clarified by centrifugation at 7000 rpm for 40 min at 4° C. for two times, and the supernatant was 0.2 μm filtered.

[0479] 3. Cation Exchange Capture Step

[0480] The clarified lysate was loaded on to a 1 L column packed with Capto SP ImpRes (GE Healthcare), previously sanitized with NaOH and equilibrated with Mcilvaine's Buffer, pH 3.0, 100 mM NaCl. The column was washed with 3 column volumes of Mcilvaine's Buffer, pH 3.0, and eluted with 5 column volume of elution buffer (34% 20 mM citric acid, pH 2.5, 66% 40 mM sodium phosphate dibasic, pH 9.0), and then stripped with 1 column volume of 20 M phosphate, 500 mM NaCl, pH 7.0. The fractions were analyzed by 4-12% Bis-Tris SDS-PAGE and Coomassie staining (FIG. 19A). Based on the gel, the elution fraction contained desired product and was used for further processing.

[0481] 4. Trypsin Digestion of Cation Exchange Column Elution Pool

[0482] After cation exchange chromatography, trypsin digestion was used to cleave off the N-tag and C-tag. pH of the pooled fractions was then adjusted to 8.0 using 40% w/w sodium hydroxide/12 M HCl, and then incubated with bovine trypsin (Sigma) at room temperature overnight with gentle mixing (1:5000 enzyme/protein mass ratio). After reaction, trypsin was inactivated by adding 2 mM EDTA and 10 mM DTT, and heating the reaction mixture to 80° C. for 15 minutes, followed by cooling on ice till the temperature was decreased to 10° C.

[0483] 5. Anion Exchange Polishing Step

[0484] Anion exchange chromatography was used as a polishing step to separate the cleaved tags and truncated products from the final product. The sample after trypsin digestion was 0.2 μm filtered, and then loaded on to a 1.57 L column packed with Capto Q ImpRes (GE Healthcare), previously sanitized with NaOH and equilibrated with 20 mM MES, pH 6.35. After loading, the column was washed with 4 column volumes of 20 mM MES pH 6.35, and then 4 column volumes of 20 mM MES, pH 6.35, 50 mM NaCl. Three gradient elution steps were applied: 20 mM MES, pH 6.35, 50-145 mM NaCl over 5 column volumes, followed by 20 mM MES, pH 6.35, 145-205 mM NaCl over 5 column volumes, and finally 20 mM MES, pH 6.35, 205-350 mM NaCl over 5 column volumes. After that, the column was stripped with 20 mM MES, pH 6.35, 500 mM NaCl for 0.5 column volume. The fractions were analyzed by SDS-PAGE followed by staining by Stains-all (FIG. 19B). Based on the gel, elutions E1 to E7 were pooled for formulation.

[0485] 7. Concentration and Buffer Exchange (Formulation)

[0486] As a final step, the pooled proteins were buffer exchanged into the formulation buffer (20 mM MES, pH 5.5) using Biomax-5 Pellicon XL ultrafiltration cassettes (Millipore) and concentrated down to a final concentration of >15 mg/mL.

### Example 8

### Purification of CCD-PCM-XTEN from High-Density Bacterial Fermentation

[0487] 1. Expression

[0488] The construct AC1254 (MKNPEQAEEQAEEQREET-His8-SASRSA-TEV-CCD1-LSGRSDNHSPLGLAGS-AE713) (“MKNPEQAEEQAEEQREET,” “His8,” “SASRSA,” and “LSGRSDNHSPLGLAGS” disclosed as SEQ ID NOS 719, 721, 218, and 97, respectively) was expressed in E. coli BL21_DE3 under the control of T7 RNA polymerase. AC1255 was cultured in a LB flask until OD600 of ˜2.5 and transferred into a 10 L fermenter containing a rich medium with 2.1 g/L glucose. After batch feed exhaustion, 70% w/v glucose was added in a pre-programmed glucose limited profile. The culture was induced with IPTG at 40-50 OD600 then cultured for 18-24 hours until harvest. The cells were pelleted by centrifugation and frozen at −80° C.

[0489] 2. Lysis and Clarification

[0490] The cell pellet (4204 g) was resuspended in 8400 ml of 50 mM citrate, pH 4.0. The resuspended cells were heated to 80° C. for 15 minutes, followed by rapid cooling on ice for 30 minutes. pH of the lysate was adjusted to 3.0 with 12 M HCl, and the lysate was stored overnight at pH 3.0 with stirring at 4° C. The lysate was then clarified by centrifugation at 7000 rpm for 40 min at 4° C. for two times, and the supernatant was 0.2 μm filtered.

[0491] 3. Cation Exchange Capture Step

[0492] The clarified lysate was loaded on to a 1 L column packed with Capto SP ImpRes (GE Healthcare), previously sanitized with NaOH and equilibrated with Mcilvaine's Buffer, pH 3.0, 100 mM NaCl. The column was washed with 3 column volumes of Mcilvaine's Buffer, pH 3.0, and eluted with 5 column volume of elution buffer (34% 20 mM citric acid, pH 2.5, 66% 40 mM sodium phosphate dibasic, pH 9.0), and then stripped with 1 column volume of 20 M phosphate, 500 mM NaCl, pH 7.0. The fractions were analyzed by 4-12% Bis-Tris SDS-PAGE and Coomassie staining (FIG. 20A). Based on the gel, the elution fraction contained desired product and was used for further processing.

[0493] 4. TEV Protease Digestion of Cation Exchange Column Elution Pool

[0494] After cation exchange chromatography, TEV protease digestion was used to cleave off the N-tag. pH of the elution pool was then adjusted to pH 8.0 using 40% w/w sodium hydroxide, and DTT and EDTA were added to the sample to reach final concentration of 1 mM each. Then, the sample was incubated with TEV protease at room temperature overnight with gentle mixing (1:20 enzyme/protein mass ratio). After reaction, TEV protease was inactivated by adding 2 mM EDTA and 10 mM DTT, and heating the reaction mixture to 80° C. for 15 minutes, followed by cooling on ice till the temperature was decreased to 10° C.

[0495] 5. Anion Exchange Polishing Step

[0496] Anion exchange chromatography was used as a polishing step to separate the cleaved tags and truncated products from the final product. The sample after TEV digestion was 0.2 μm filtered, and then loaded on to a 3 L column packed with Capto Q ImpRes (GE Healthcare), previously sanitized with NaOH and equilibrated with 20 mM MES, pH 6.35. After loading, the column was washed with 3 column volumes of 20 mM MES pH 6.35, and 3 column volumes of 20 mM MES, pH 6.35, 40 mM NaCl. Three gradient elution steps were then applied: 20 mM MES, pH 6.35, 40-90 mM NaCl over 3 column volumes, followed by 20 mM MES, pH 6.35, 90-200 mM NaCl over 5 column volumes, and finally 20 mM MES, pH 6.35, 200-350 mM NaCl over 8 column volumes. The column was then stripped with 20 mM MES, pH 6.35, 500 mM NaCl for 1 column volume. The fractions were analyzed by SDS-PAGE followed by staining by Stains-all (FIG. 20B). Based on the gel, elutions 17 to 22 were pooled for formulation.

[0497] 7. Concentration and Buffer Exchange (Formulation)

[0498] As a final step, the pooled proteins were buffer exchanged into the formulation buffer (20 mM MES, pH 5.5) using Biomax-5 Pellicon XL ultrafiltration cassettes (Millipore) and concentrated down to a final concentration of >15 mg/mL.

### Example 9

### Enzyme Activation, Storage and Digestion of CCD-PCM-XTEN Construct AC1254

[0499] The example shows that one of the aforementioned CCD-PCM-XTEN constructs AC1254, with PCM sequence being BSRS1 in Table 8 and previously described in Example 8, can be cleaved by various tumor-associated proteases including MMP-2, MMP-7, MMP-9, MMP-14, MTSP1, and uPA in test tubes.

[0500] 1. Enzyme Activation

[0501] All enzymes used were obtained from R&D Systems. Recombinant human u-plasminogen activator (uPA) and recombinant human matriptase were provided as activated enzymes and stored at −80° C. until use. Recombinant mouse MMP-2, recombinant human MMP-7, and recombinant mouse MMP-9 were supplied as zymogens and required activation by 4-aminophenylmercuric acetate (APMA). APMA was first dissolved in 0.1M NaOH to a final concentration of 10 mM before the pH was readjusted to neutral using 0.1N HCl. Further dilution of the APMA stock to 2.5 mM was done in 50 mM Tris, 150 mM NaCl, 10 mM CaCl₂, pH 7.5. To activate pro-MMP, 1 mM APMA and 100 ug/mL of pro-MMP were incubated at 37° C. for 1 hour (MMP-2, MMP-7) or 3 hours (MMP-9). Activated enzyme added to a fmal concentration of 50% glycerol could then be stored at −20° C. for several weeks.

[0502] 2. Enzymatic Digestion

[0503] A panel of enzymes was tested to determine cleavage efficiency of each enzyme for AC1254 (CCD1-BSRS1-AE713). 10 μM of the substrate was incubated with each enzyme in the following enzyme-to-substrate molar ratios: MMP-2 (1:680), MMP-7 (1:200), MMP-9 (1: 6711), matriptase (1:12.5), and uPA (1:12.5). Reactions were incubated at 37° C. for two hours before stopping digestion by adding EDTA to 20 mM in the case of MMP reactions and heating at 85° C. for 15 minutes in the case of uPA and matriptase reactions.

[0504] 3. Analysis of Cleavage Efficiency.

[0505] Analysis of the samples to determine percentage of cleaved product was performed by loading 5 μg of undigested and digested material on SDS-PAGE and staining with Coomassie Blue (FIG. 45A), as well as running 8 μg of undigested and digested product to C4 RP-HPLC (FIG. 45B). Through RP-HPLC, a typical time course of MMP-9 digestion over the course of an hour could be observed through analyzing samples of the digestion reaction collected at 10 minute intervals. (FIG. 44A) Two negative controls could also be included: one to confirm that digestion did not occur in the absence of MMP, and one to confirm that digestion did not occur in the presence of APMA alone (FIG. 44B). For SDS-PAGE gels, ImageJ was used to analyze band intensity and determine percent cleavage. Upon cleavage by various proteases at the PCM segment, the substrate CCD1-PCM-XTEN would yield two fragments, with the small fragment mostly containing CCD1 and the other containing XTEN, which would migrate at a lower apparent molecular weight on SDS-PAGE. The results confirm that all proteases tested here cleaved the construct as intended, with varying degree of catalytic efficiency.

### Example 10

### Conjugation of IA-MMAE to CXTEN864 to Produce 3x-MMAE-CXTEN864

[0506] 205 mg of CXTEN (XTEN_AE864(Am1,C12,C432,C854), sequence in Table 31, below) was reduced with 3 molar equivalents of TCEP at pH 8.0 for 20 min at 80° C. The reduced 3x-Cys-XTEN was reacted with 5 molar equivalents of IA-MMAE (dissolved in anhydrous DMF) overnight at 25° C. Conjugation efficiency was assessed by C4 RP-HPLC. Quantification of the separation between the fully conjugated drug-loaded product peak (in this case the 3x-MMAE peak) and the underconjugated peak closest to the fully conjugated peak (in this case the 2x-MMAE peak) was determined by computing the Peak Separation as the difference in retention time between these peaks divided by the full width at half maximum, using the following formula:

Peak Separation=(t_{R2}−t_{R1})/FWHM

[0507] wherein

[0508] t_{R2}: retention time of fully conjugated product peak

[0509] t_{R1}: retention time of underconjugated peak that is the closest to the fully conjugated product peak

[0510] FWHM: full width at half maximum

[0511] Analytical method for comparison of separation for different constructs: reaction mixture containing 10 μg XTEN was injected to C4 RP-HPLC (Vydac, catalog #214TP5415, 4.6 mm×150 mm, 5 um particle size)) and analyzed using a method of 5-50% Buffer B (0.1% TFA in acetonitrile) in Buffer A (0.1% TFA in water) over 45 minutes at 1 mL/min.

[0512] Using this method, Peak Separation was determined to be 4.5 for CXTEN when making 3xMMAE conjugate (FIG. 33B).

[0513] For purification, the mixture was acidified to pH <3 with TFA, and DMF was added to final volume of 13% (v/v). The mixture was split into two aliquots, and each was purified by preparative C4 RP-HPLC (C4, Vydac, 250 mm×22 mm). Chromatographic fractions were analyzed by C4 RP-HPLC. Fractions containing the desired product were pooled, neutralized with 1 M HEPES pH 8.0, and concentrated under vacuum. The 3x-MMAE-XTEN product was formulated into 20 mM HEPES pH 7.0, 50 mM NaCl using ultrafiltration (Sartorius, Vivacell 100, 10 kDa MWCO). High purity of the final product was demonstrated by C4 RP-HPLC (>95%, FIG. 32). The reaction yield was determined to be 53.0%.

TABLE 31
Amino acid sequence of components in Example 10

| Component Name | Amino Acid Sequence |
|---|---|
| XTEN_AE864 (Am1, C12, | SAGSPTAEAAGCGTAEAATSESATPESGPGTSTEPSEGSAP |
| C432, C854) | GSPAGSPTSTEEGTSTEPSEGSAPGTSTEPSEGSAPGTSESA |
| | TPESGPGSEPATSGSETPGSEPATSGSETPGSPAGSPTSTEE |
| | GTSESATPESGPGTSTEPSEGSAPGTSTEPSEGSAPGSPAGS |
| | PTSTEEGTSTEPSEGSAPGTSTEPSEGSAPGTSESATPESGP |
| | GTSTEPSEGSAPGTSESATPESGPGSEPATSGSETPGTSTEPS |
| | EGSAPGTSTEPSEGSAPGTSESATPESGPGTSESATPESGPG |
| | SPAGSPTSTEEGTSESATPESGPGSEPATSGSETPGTSESATP |
| | ESGPGTSTEPSEGSAPGTSTEPSEGSAPGTSTEPSEGSAPGT |
| | STEPSEGSAPGTSTEPSEGSAPGTSTEPSEGSAPGSPAGSPTS |
| | TEETAEAAGCGTAEAATSESATPESGPGSEPATSGSETPGT |
| | SESATPESGPGSEPATSGSETPGTSESATPESGPGTSTEPSEG |
| | SAPGTSESATPESGPGSPAGSPTSTEEGSPAGSPTSTEEGSP |
| | AGSPTSTEEGTSESATPESGPGTSTEPSEGSAPGTSESATPE |
| | SGPGSEPATSGSETPGTSESATPESGPGSEPATSGSETPGTS |
| | ESATPESGPGTSTEPSEGSAPGSPAGSPTSTEEGTSESATPES |
| | GPGSEPATSGSETPGTSESATPESGPGSPAGSPTSTEEGSPA |
| | GSPTSTEEGTSTEPSEGSAPGTSESATPESGPGTSESATPES |
| | GPGTSESATPESGPGSEPATSGSETPGSEPATSGSETPGSPA |
| | GSPTSTEEGTSTEPSEGSAPGTSTEPSEGSAPGSEPATSGSE |
| | TPGSTAEAAGCGTAEAASASR (SEQ ID NO: 722) |

### Example 11

### Conjugation of IA-MMAE to CCD-XTEN to Produce 3x-MMAE-CCD-XTEN

[0514] To 236 mg of CCD-XTEN (XTEN_AE759(Am1,C8,C24,C40), sequence in Table 33, below) in 12.3 mL of 20 mM MES pH 5.5 was added 3.08 mL 1 M HEPES pH 8.0. This CCD-XTEN was reduced with 3 molar equivalents of TCEP for 20 min at 80° C. The reduced CCD-XTEN was then diluted with 1.4 mL of 1 M HEPES pH 8.0 and reacted with 6 molar equivalents of IA-MMAE (dissolved in 6.13 mL anhydrous DMF) for 24 h at 25° C. The reaction was quenched with 30 molar equivalents of glutathione for 30 min at 25° C.

[0515] Conjugation was assessed by C4 RP-HPLC (Vydac, catalog #214TP5415, 4.6 mm×150 mm, 5 um particle size) using the same analytical method as described in Example 10. Improved Peak Separation (Peak Separation=11.8) for 3x drug-loaded CCD-XTEN was observed (FIG. 33B), compared to 3x drug-loaded CXTEN (Peak Separation=4.5, see Example 10).

[0516] The mixture was acidified to pH <3 with TFA, and DMF was added to final volume of 13% (v/v). The desired 3x-MMAE-XTEN product was purified by preparative C4 RP-HPLC (C4, Vydac, 250 mm×22 mm). Chromatographic fractions were analyzed by C4 RP-HPLC. Fractions containing the desired product were pooled, neutralized with 1 M HEPES pH 8.0, and purified over a MacroCap Q column (GE Healthcare), with elution using a gradient of 10 column volumes from 150 mM to 350 mM NaCl. Chromatographic fractions were analyzed by C4 RP-HPLC. Selected fractions with 3x-MMAE-CCD-XTEN were pooled and formulated into 20 mM HEPES pH 7.0, 50 mM NaCl using ultrafiltration. High purity of the final product was demonstrated by C4 RP-HPLC (>95%, FIG. 21A). The reaction yield was determined to be 57.9%, which was superior to that achieved in the conjugation of IA-MMAE to the CXTEN (see Example 10, above).

[0517] Conclusions: The incorporation of CCD into the fusion proteins of the constructs resulted in an enhanced ability to recover the desired fully-conjugated product compared to constructs utilizing CXTEN (as determined by Peak Separation) and overall higher product yields.

### Example 12

### Conjugation of IA-MMAE to CCD-PCM-XTEN to Produce 3x-MMAE-CCD-PCM-XTEN

[0518] CCD-PCM-XTEN (XTEN_AE42(Am1,C8,C24,C40)-PCM-XTEN_AE713 was reduced with 3 molar equivalents of TCEP at pH 8.0 for 20 min at 80° C. The reduced CCD-PCM-XTEN was then reacted with 6 molar equivalents of IA-MMAE at pH 8.0 for 2 d at 25° C. The reaction was quenched with 30 molar equivalents of glutathione for 30 min at 25° C., and the conjugation was assessed by C4 RP-HPLC. The mixture was acidified to pH <3 with TFA, and DMF was added to final volume of 13% (v/v). The desired 3x-MMAE-CCD-PCM-XTEN product was purified by preparative C4 RP-HPLC (C4, Vydac, 250 mm×22 mm). Chromatographic fractions were analyzed by C4 RP-HPLC. Fractions containing the desired product were pooled, neutralized with 1 M HEPES pH 8.0, and purified over a MacroCap Q column (GE Healthcare), with elution using a gradient of 10 column volumes from 150 mM to 350 mM NaCl. Chromatographic fractions were analyzed by C4 RP-HPLC. Selected fractions with 3x-MMAE-CCD-PCM-XTEN were pooled and formulated into 20 mM HEPES pH 7.0, 50 mM NaCl using ultrafiltration. High purity of the final product was demonstrated by C4 RP-HPLC (>95%, FIG. 21B) and intact mass (observed ESI-MS of +12 Da).

### Example 13

### Preparation of Iodoacetamide-3x-DM1-CXTEN by Conjugation

[0519] The pH of 1.5 mL of XTEN_AE432(Am1,C12,C217,C422) (28.5 mg, 725 nmol) cysteine-engineered XTEN segment in 20 mM MES pH 5.5 was adjusted with 0.075 mL of 1 M HEPES pH 8.0. To this 3x-Cys-XTEN was added 0.067 mL of IA-DM1 (54 mM in anhydrous DMF), and additional DMF was added to fully solubilize the IA-DM1. The reaction was incubated at room temperature for 2.5 h and monitored by RP-HPLC. The 3x-DM1-CXTEN product was purified by preparative HPLC (C4, Vydac, 250 mm×10 mm). Chromatographic fractions were analyzed by C4 RP-HPLC. Fractions containing 3x-DM1-CXTEN were pooled, neutralized with 1 M HEPES pH 8.0, and concentrated under vacuum. The 3x-DM1-CXTEN product was formulated into 20 mM HEPES pH 7.0, 135 mM NaCl using ultrafiltration (Amicon Ultra-15, 3 kDa MWCO). The N-terminus of 3x-DM1-CXTEN was converted to the iodoacetamide by reaction of 0.45 mL of 3x-DM1-CXTEN (4.1 mg, 99 nmol) and 0.023 mL 1 M HEPES pH 8.0 with 0.01 mL of SIA (50 mM in anhydrous DMF) at room temperature for 2 h. Excess SIA was removed during formulation into 20 mM HEPES pH 7.0, 135 mM NaCl by ultrafiltration (Amicon Ultra-15, 5 kDa MWCO).

### Example 14

### Preparation of Iodoacetamide-3x-MMAE-CXTEN by Conjugation

[0520] The pH of 1 mL of XTEN_AE432(Am1,C12,C217,C422) (30.4 mg) cysteine-engineered XTEN segment in 20 mM MES pH 5.5 was adjusted with 0.27 mL of 1 M HEPES pH 8.0. To this 3x-Cys-XTEN was added IA-MMAE (5 molar equivalents, 64.6 mg/mL in anhydrous DMF), and additional 0.3 mL DMF was added to fully solubilize the IA-MMAE in the mixture. The reaction was incubated at 25° C. for 4 h and monitored by C4 RP-HPLC. The 3x-MMAE-CXTEN product was split into two aliquots, and each was purified by preparative HPLC (C4, Vydac, 250 mm×10 mm) Chromatographic fractions were analyzed by C4 RP-HPLC. Fractions containing 3x-MMAE-CXTEN were pooled, neutralized with 1 M HEPES pH 8.0, and concentrated under vacuum. The 3x-MMAE-CXTEN product was formulated into 20 mM HEPES pH 7.0, 50 mM NaCl using ultrafiltration (Amicon Ultra-15, 3 kDa MWCO). The N-terminus of 3x-MMAE-CXTEN was converted to the iodoacetamide by reaction of 3x-MMAE-CXTEN (126 mg, 2940 nmol) in 15 mL of 20 mM HEPES pH 7.0, 50 mM NaCl with 0.15 mL of SIA (10 molar equivalents, 200 mM in anhydrous DMF) at 25° C. for 1.5 h. Excess SIA was removed during formulation into 20 mM HEPES pH 7.0 by ultrafiltration (Sartorius, Vivacell 100, 5 kDa MWCO). The results of ESI-MS (calc MW 43,024.5 Da, obs MW 43,022.0 Da) and IA reactivity with model cysteine-containing peptide HCKFWW (Bachem, H-3524) of 87.4% demonstrated high purity and reactivity of the final product.

### Example 15

### Preparation of MCC-3x-MMAE-CCD-XTEN or MCC-3x-MMAE-CCD-PCM-XTEN

[0521] 30 mg of 3x-MMAE-CCD-XTEN (from Example 11) or 3x-MMAE-CCD-PCM-XTEN (from Example 12) was reacted with 10 molar equivalents SMCC (dissolved in DMF) in 20 mM HEPES pH 7.0, 50 mM NaCl, 3.3% (v/v) DMF for 1 h at 25° C. temperature. Excess SMCC was removed by ultrafiltration using 20 mM HEPES pH 7.0, 50 mM NaCl. High purity of product was demonstrated by C4 RP-HPLC (>95%, FIG. 22A) and SDS-PAGE (FIG. 22B). MCC-3x-MMAE-CCD-XTEN and MCC-3x-MMAE-CCD-PCM-XTEN reactivity were each assessed by reaction with model cysteine-containing XTEN (XTEN_AE288(Am1,C283). The results of MCC reactivity showed high yield of maleimide products (FIG. 22B).

### Example 16

### Conjugation of aHER2-XTEN to 3x-DM1-CXTEN to Make an aHER2-Targeted XTEN-3x-DM1 Conjugate

[0522] 10 mL of aHER2-XTEN_AE304(C296)-H8 (153 mg, 2722 nmol) in 20 mM HEPES pH 7.0, 50 mM NaCl was reduced with 0.5 mM TCEP for 1.5 hat room temperature. Excess TCEP was removed by loading 2.5 mL each to four desalting columns (GE, PD-10) and eluting each with 3.5 mL of 20 mM HEPES pH 7.0, 50 mM NaCl (14 mL total). The cysteine side chain of reduced of aHER2-XTEN_AE304(C296)-H8 (153 mg, 2722 nmol) was reacted with the N-terminal iodoacetamide of IA-3xDM1-CXTEN (1853 nmol, see Example 13) in a total volume of 28 mL of 20 mM HEPES pH 7.0, 50 mM NaCl with pH adjusted to 8.5 with sodium borate buffer at 25° C. overnight. Reaction was monitored by SDS-PAGE. The mixture was loaded onto an immobilized metal affinity chromatography column (Toyopearl AF-Chelate 650M, 150 mL, 50 mm diameter) charged with Cu(II). Unreacted IA-3x-DM1-CXTEN was removed in the flow-through. aHER2-targeted XTEN-drug conjugate was eluted with 10 mM to 100 mM imidazole in 20 mM phosphate pH 7.0. Chromatographic fractions were analyzed by SDS-PAGE. Fractions with desired conjugate were pooled and purified over a MacroCap Q column (GE Healthcare, 100 mL, 50 mm diameter), with elution in 18 column volume gradient from 150 mM to 350 mM NaCl in 20 mM HEPES pH 7.0. Chromatographic fractions were analyzed by SDS-PAGE. Selected fractions with the aHER2-targeted CXTEN-3x-DM1 conjugate were pooled and formulated into PBS using ultrafiltration (Sartorius, Vivacell 100, 10 kDa MWCO). The results of SDS-PAGE (FIG. 25A), ESI-MS (FIG. 25B), and HIC (FIG. 25C) analyses demonstrated high purity of the fmal product.

TABLE 32
Amino acid sequence of components in Examples 16 and 17

| Component Name | Amino Acid Sequence |
|---|---|
| aHER2-XTEN_AE304 | DIQMTQSPSSLSASVGDRVTITCRASQDVNTAVAWYQQKPG |
| (C296)-118 | KAPKLLIYSASFLYSGVPSRFSGSRSGTDFTLTISSLQPEDFAT |
| | YYCQQHYTTPPTFGQGTKVEIKTGSGEGSEGEGGGEGSEGE |
| | GSGEGGEGEGSGTEVQLVESGGGLVQPGGSLRLSCAASGFN |
| | IKDTYIHWVRQAPGKGLEWVARIYPTNGYTRYADSVKGRF |
| | TISADTSKNTAYLQMNSLRAEDTAVYYCSRWGGDGFYAM |
| | DYWGQGTLVTVSGSPGTSESATPESGPGSEPATSGSETPGTS |
| | ESATPESGPGSEPATSGSETPGTSESATPESGPGTSTEPSEGSA |
| | PGSPAGSPTSTEEGTSESATPESGPGSEPATSGSETPGTSESAT |
| | PESGPGSPAGSPTSTEEGSPAGSPTSTEEGTSTEPSEGSAPGTS |
| | ESATPESGPGTSESATPESGPGTSESATPESGPGSEPATSGSET |
| | PGSEPATSGSETPGSPAGSPTSTEEGTSTEPSEGSAPGTSTEPS |
| | EGSAPGSEPATSGSETPGTSESATPESGPGTSTEPSEGSAPGG |
| | APCGPAGGSSSHHHHHHHH (SEQ ID NO 723) |
| XTEN_AE432 (Am1, C12, | SAGSPTAEAAGCGTAEAAGTSESATPESGPGSEPATSGSETP |
| C217, C422) | GTSESATPESGPGTSTEPSEGSAPGTSESATPESGPGSPAGSPT |
| | STEEGSPAGSPTSTEEGSPAGSPTSTEEGTSESATPESGPGTST |
| | EPSEGSAPGTSESATPESGPGSEPATSGSETPGTSESATPESGP |
| | GSEPATSGSETPGTSESATPESGPGTSTEPSEGSAPTAEAAGC |
| | GTAEAAGSPAGSPTSTEEGTSESATPESGPGSEPATSGSETPG |
| | TSESATPESGPGSPAGSPTSTEEGSPAGSPTSTEEGTSTEPSEG |
| | SAPGTSESATPESGPGTSESATPESGPGTSESATPESGPGSEPA |
| | TSGSETPGSEPATSGSETPGSPAGSPTSTEEGTSTEPSEGSAPG |
| | TSTEPSEGSAPGSEPATSGSETPTAEAAGCGTAEAASASR |
| | (SEQ ID NO 724) |

### Example 17

### Conjugation of aHER2-XTEN to 3x-MMAE-CXTEN to Make an aHER2-Targeted XTEN-3x-MMAE Conjugate

[0523] 10 mL of aHER2-XTEN_AE304(C296)-H8 (153 mg, 2722 nmol) in 20 mM HEPES pH 7.0, 50 mM NaCl was reduced with 0.5 mM TCEP for 1.5 hat room temperature. Excess TCEP was removed by loading 2.5 mL each to four desalting columns (GE, PD-10) and eluting each with 3.5 mL of 20 mM HEPES pH 7.0, 50 mM NaCl (14 mL total). The cysteine side chain of reduced of aHER2-XTEN_AE304(C296)-H8 (153 mg, 2722 nmol) was reacted with the N-terminal iodoacetamide of IA-3xMMAE-CXTEN (2722 nmol, see Example 14) in a total volume of 20 mL of 20 mM HEPES pH 7.0, 50 mM NaCl with pH adjusted to 8.5 with sodium borate buffer at 25° C. overnight. Reaction was monitored by SDS-PAGE. The mixture was loaded onto an immobilized metal affinity chromatography column (Toyopearl AF-Chelate 650M, 150 mL, 50 mm diameter) charged with Cu(II). Unreacted IA-3x-MMAE-XTEN was removed in the flow-through. aHER2-targeted XTEN-drug conjugate was eluted with 10 mM to 100 mM imidazole in 20 mM phosphate pH 7.0. Chromatographic fractions were analyzed by SDS-PAGE. Fractions with desired conjugate were pooled and purified over a MacroCap Q column (GE Healthcare, 100 mL, 50 mm diameter), with elution in 14 column volume gradient from 150 mM to 350 mM NaCl in 20 mM HEPES pH 7.0. Chromatographic fractions were analyzed by SDS-PAGE. Selected fractions with the aHER2-targeted XTEN-3x-MMAE conjugate were pooled and formulated into PBS using ultrafiltration (Sartorius, Vivacell 100, 10 kDa MWCO). The results of SDS-PAGE (FIG. 29A) and ESI-MS (FIG. 29B) analyses demonstrated high purity of the final product.

### Example 18

### Conjugation of aHER2-XTEN to MCC-3x-MMAE-CCD-XTEN to Make an aHER2-Targeted CCD-XTEN-Drug Conjugate

[0524] aHER2-XTEN_AE44(C36)-H8 (10.2 mg, 315 nmol) in 1 mL of 20 mM HEPES pH 7.0, 50 mM NaCl was reduced with 1 mM TCEP for 1.5 hat room temperature. Excess TCEP was removed by desalting column (GE, PD MiniTrap G-25), eluting in 1.5 mL of 20 mM HEPES pH 7.0, 50 mM NaCl. The cysteine side chain of reduced aHER2-XTEN_AE44(C36)-H8 (10.2 mg, 315 nmol) was reacted with the N-terminal maleimide of MCC-3x-MMAE-CCD-XTEN (13 mg, 178 nmol, see Example 15) in a total volume of 2.5 mL 20 mM HEPES pH 7.0, 50 mM NaCl at 25° C. for 2 h. The reaction was monitored by SDS-PAGE. The reaction mixture was diluted with 6.5 mL of 20 mM sodium phosphate pH 7.0 and loaded onto an immobilized metal affinity chromatography column (Toyopearl AF-Chelate 650M, 9 mL, 15 mm diameter) charged with Cu(II). Unreacted MCC-3x-MMAE-CCD-XTEN was removed in the flow-through. aHER2-targeted XTEN-drug conjugate was eluted with 10 mM to 100 mM imidazole in 20 mM phosphate pH 7.0. Chromatographic fractions were analyzed by SDS-PAGE. Fractions with desired conjugate were pooled and purified over a MacroCap Q column (GE Healthcare, 10 mL, 16 mm diameter), with elution using a 10 column volume gradient from 150 mM to 350 mM NaCl in 20 mM HEPES pH 7.0. Chromatographic fractions were analyzed by SDS-PAGE. Selected fractions with aHER2-targeted XTEN-drug conjugate were pooled and formulated into PBS using ultrafiltration (Sartorius, Vivaspin 15R, 5 kDa MWCO). The results of SDS-PAGE (FIG. 23A), ESI-MS (FIG. 23B), and SEC-HPLC (FIG. 23C) analyses demonstrated high purity of the final product.

TABLE 33
Amino acid sequence of components in Example 18

| Component Name | Amino Acid SequenCe |
|---|---|
| aHER2-XTEN_AE44 | DIQMTQSPSSLSASVGDRVTITCRASQDVNTAVAWYQQKPG |
| (C36)-118 | KAPKLLIYSASFLYSGVPSRFSGSRSGTDFTLTISSLQPEDFAT |
| | YYCQQHYTTPPTFGQGTKVEIKTGSGEGSEGEGGGEGSEGE |
| | GSGEGGEGEGSGTEVQLVESGGGLVQPGGSLRLSCAASGFN |
| | IKDTYIHWVRQAPGKGLEWVARIYPTNGYTRYADSVKGRF |
| | TISADTSKNTAYLQMNSLRAEDTAVYYCSRWGGDGFYAM |
| | DYWGQGTLVTVSGSPGSAGSGSETPGTSESATPESGPGTSTE |
| | PSGAPCGPAGGSSSHHHHHHHH (SEQ ID NO 725) |
| XTEN_AE759 (Am1, | GSPGAGSCAGSPTSTEEGTSESACSPEGPGTSTEPSEGSCGGP |
| C8, C24, C40) | GSPAGSPTSTEEGTSESATPESGPGTSTEPSEGSAPGSPAGSPT |
| | STEEGTSTEPSEGSAPGTSTEPSEGSAPGTSESATPESGPGSEP |
| | ATSGSETPGSEPATSGSETPGSPAGSPTSTEEGTSESATPESGP |
| | GTSTEPSEGSAPGTSTEPSEGSAPGSPAGSPTSTEEGTSTEPSE |
| | GSAPGTSTEPSEGSAPGTSESATPESGPGTSTEPSEGSAPGTSE |
| | SATPESGPGSEPATSGSETPGTSTEPSEGSAPGTSTEPSEGSAP |
| | GTSESATPESGPGTSESATPESGPGSPAGSPTSTEEGTSESATP |
| | ESGPGSEPATSGSETPGTSESATPESGPGTSTEPSEGSAPGTST |
| | EPSEGSAPGTSTEPSEGSAPGTSTEPSEGSAPGTSTEPSEGSAP |
| | GTSTEPSEGSAPGSPAGSPTSTEEGTSTEPSEGSAPGTSESATP |
| | ESGPGSEPATSGSETPGTSESATPESGPGSEPATSGSETPGTSE |
| | SATPESGPGTSTEPSEGSAPGTSESATPESGPGSPAGSPTSTEE |
| | GSPAGSPTSTEEGSPAGSPTSTEEGTSESATPESGPGTSTEPSE |
| | GSAPGTSESATPESGPGSEPATSGSETPGTSESATPESGPGSEP |
| | ATSGSETPGTSESATPESGPGTSTEPSEGSAPGSPAGSPTSTEE |
| | GTSESATPESGPGSEPATSGSETPGTSESATPESGPGSPAGSPT |
| | STEEGSPASASR (SEQ ID NO: 726) |

### Example 19

### Conjugation of aHER2-XTEN to MCC-3x-MMAE-CCD-PCM-XTEN to Make an aHER2-Targeted CCD-XTEN-Drug Conjugate with PCM

[0525] aHER2-XTEN_AE44(C36)-H8 (20.4 mg, 630 nmol) in 2 mL of 20 mM HEPES pH 7.0, 50 mM NaCl was reduced with 0.75 mM TCEP for 1.5 h at room temperature. Excess TCEP was removed by desalting column (GE, PD-10), eluting in 3.5 mL of 20 mM HEPES pH 7.0, 50 mM NaCl. The cysteine side chain of reduced aHER2-XTEN_AE44(C36)-H8 (20.4 mg, 630 nmol) was reacted with the N-terminal maleimide of MCC-3x-MMAE-CCD-PCM-XTEN (30 mg, 403 nmol, see Example 15) in a total volume of 7.3 mL 20 mM HEPES pH 7.0, 50 mM NaCl at 25° C. for 2 h. The reaction was monitored by SDS-PAGE. The mixture was diluted with 12.7 mL of 20 mM sodium phosphate pH 7.0 and loaded onto an immobilized metal affinity chromatography column (Toyopearl AF-Chelate 650M, 20 mL, 27 mm diameter) charged with Cu(II). Unreacted MCC-3x-MMAE-CCD-PCM-XTEN was removed in the flow-through. aHER2-targeted XTEN-drug conjugate was eluted with 10 mM to 100 mM imidazole in 20 mM phosphate pH 7.0. Chromatographic fractions were analyzed by SDS-PAGE. Fractions with desired conjugate were pooled and purified over a MacroCap Q column (GE Healthcare, 25 mL, 16 mm diameter), with elution using a 10 column volume gradient from 150 mM to 350 mM NaCl in 20 mM HEPES pH 7.0. Chromatographic fractions were analyzed by SDS-PAGE. Selected fractions with pure aHER2-targeted XTEN-drug conjugate with PCM were pooled and formulated into PBS using ultrafiltration (Sartorius, Vivaspin 15R, 5 kDa MWCO). The results of SDS-PAGE (FIG. 24A), ESI-MS (FIG. 24B), and SEC-HPLC (FIG. 24C) analyses demonstrated high purity of the final product.

TABLE 34
Amino acid sequence of components in Example 19

| Component Name | Amino Acid Sequence |
|---|---|
| aHER2-XTEN_AE44 | DIQMTQSPSSLSASVGDRVTITCRASQDVNTAVAWYQQKPG |
| (C36)-118 | KAPKLLIYSASFLYSGVPSRFSGSRSGTDFTLTISSLQPEDFAT |
| | YYCQQHYTTPPTFGQGTKVEIKTGSGEGSEGEGGGEGSEGE |
| | GSGEGGEGEGSGTEVQLVESGGGLVQPGGSLRLSCAASGFN |
| | IKDTYIHWVRQAPGKGLEWVARIYPTNGYTRYADSVKGRF |
| | TISADTSKNTAYLQMNSLRAEDTAVYYCSRWGGDGFYAM |
| | DYWGQGTLVTVSGSPGSAGSGSETPGTSESATPESGPGTSTE |
| | PSGAPCGPAGGSSSHHHHHHHH (SEQ ID NO: 727) |
| XTEN_AE42 (Am1, C8, | GSPGAGSCAGSPTSTEEGTSESACSPEGPGTSTEPSEGSCGG |
| C24, C40) | (SEQ ID NO: 728) |
| PCM | LSGRSDNHSPLGLAGS (SEQ ID NO: 729) |
| XTEN_AE713 | PGSPAGSPTSTEEGTSESATPESGPGTSTEPSEGSAPGSPAGSP |
| | TSTEEGTSTEPSEGSAPGTSTEPSEGSAPGTSESATPESGPGSE |
| | PATSGSETPGSEPATSGSETPGSPAGSPTSTEEGTSESATPESG |
| | PGTSTEPSEGSAPGTSTEPSEGSAPGSPAGSPTSTEEGTSTEPS |
| | EGSAPGTSTEPSEGSAPGTSESATPESGPGTSTEPSEGSAPGTS |
| | ESATPESGPGSEPATSGSETPGTSTEPSEGSAPGTSTEPSEGSA |
| | PGTSESATPESGPGTSESATPESGPGSPAGSPTSTEEGTSESAT |
| | PESGPGSEPATSGSETPGTSESATPESGPGTSTEPSEGSAPGTS |
| | TEPSEGSAPGTSTEPSEGSAPGTSTEPSEGSAPGTSTEPSEGSA |
| | PGTSTEPSEGSAPGSPAGSPTSTEEGTSTEPSEGSAPGTSESAT |
| | PESGPGSEPATSGSETPGTSESATPESGPGSEPATSGSETPGTS |
| | ESATPESGPGTSTEPSEGSAPGTSESATPESGPGSPAGSPTSTE |
| | EGSPAGSPTSTEEGSPAGSPTSTEEGTSESATPESGPGTSTEPS |
| | EGSAPGTSESATPESGPGSEPATSGSETPGTSESATPESGPGSE |
| | PATSGSETPGTSESATPESGPGTSTEPSEGSAPGSPAGSPTSTE |
| | EGTSESATPESGPGSEPATSGSETPGTSESATPESGPGSPAGSP |
| | TSTEEGSPA (SEQ ID NO: 730) |

### Example 20

### Conjugation of Folate-AHHAC to IA-3x-MMAE-CCD-XTEN to Make a Folate-Targeted CCD-XTEN-Drug Conjugate

[0526] The N-terminus of 3x-MMAE-CCD-XTEN (18.1 mg, see Example 11) was converted to iodoacetamide with SIA (10 molar equivalents) reacted with the cysteine side chain of Folate-AHHAC (3 molar equivalents) in a total volume of 1.8 mL 200 mM HEPES pH 7.0, 50 mM NaCl at 25° C. overnight. The reaction mixture was loaded onto an immobilized metal affinity chromatography column (Toyopearl AF-Chelate 650M, 20 mL, 27 mm diameter) charged with Cu(II). Unreacted IA-3x-MMAE-CCD-XTEN was removed in the flow-through. Folate-targeted XTEN-drug conjugate was eluted with 50 mM imidazole in 20 mM phosphate pH 8.0. Chromatographic fractions were analyzed by MALDI-MS and SDS-PAGE. Fractions with desired conjugate were pooled, acidified to pH <3 with TFA, then purified by preparative HPLC (C4, Vydac, 250 mm×10 mm) Chromatographic fractions were analyzed by MALDI and RP-HPLC. Fractions containing the folate-targeted XDC were pooled, neutralized with 1 M HEPES pH 8.0, and concentrated under vacuum. The product was formulated into PBS using ultrafiltration (Amicon Ultra-4, 3 kDa MWCO). Purity of the product was demonstrated by C4 RP-HPLC (FIG. 30A) and SDS-PAGE (FIG. 30B).

### Example 21

### Conjugation of Folate-AHHAC to MCC-3x-MMAE-CCD-PCM-XTEN to Make a Folate-Targeted CCD-XTEN-Drug Conjugate with PCM

[0527] MCC-3x-MMAE-CCD-PCM-XTEN (33.5 mg, see Example 15) was reacted with the cysteine side chain of Folate-AHHAC (3 molar equivalents) in a total volume of 4.3 mL 200 mM HEPES pH 7.0, 50 mM NaCl at 25° C. overnight. The reaction mixture was loaded onto an immobilized metal affinity chromatography column (Toyopearl AF-Chelate 650M, 20 mL, 27 mm diameter) charged with Cu(II). Unreacted MCC-3x-MMAE-CCD-PCM-XTEN was removed in the flow-through. Folate-targeted XTEN-drug conjugate with PCM was eluted with 50 mM imidazole in 20 mM phosphate pH 8.0. Chromatographic fractions were analyzed by MALDI-MS. Fractions with desired conjugate were pooled, acidified to pH <3 with TFA, then purified by preparative HPLC (C4, Vydac, 250 mm×10 mm). Chromatographic fractions were analyzed by MALDI-MS and RP-HPLC. Fractions containing the folate-targeted XDC were pooled, neutralized with 1 M HEPES pH 8.0, and concentrated under vacuum. The product was formulated into PBS using ultrafiltration (Amicon Ultra-15, 3 kDa MWCO). Purity of the product was demonstrated by C4 RP-HPLC (FIG. 31A) and SDS-PAGE (FIG. 31B).

### Example 22

### Preparation of A Bispecific Conjugate from Monospecific XTEN Precursors Linked by the N-termini

[0528] The example describes the creation of an XTEN-conjugate composition by linking two different XTEN-payload precursors in an N- to N-terminus configuration; one with a payload A and one with a payload B, resulting in a bispecific conjugate.

[0529] As a first step, XTEN molecules containing multiple cysteines (cysteine-engineered XTEN) are prepared as described above, and are formulated in 20 mM HEPES, pH 7.0, 50 mM NaCl. A Payload A-maleimide is dissolved in aqueous solution 20 mM HEPES, pH 7.0, DMF or DMCO or any other appropriate solvent depending on reagent solubility. The Payload A-maleimide is added to the cysteine-engineered XTEN in a 2-6 molar excess over XTEN and incubated for 1 hr at 25° C. Completion of modification is monitored by C18 RP-HPLC. The resulting Payload A-XTEN conjugate is purified from contaminants and unreacted components using preparative C4-C18 RP-HPLC. The Payload A-XTEN conjugate is formulated in 20 mM HEPES, pH 7.0, 50 mM NaCl. Next, the Payload A-XTEN conjugate is further modified by adding dibenzylcyclooctyne (DBCO)-NHS ester or DBCO-sulfo-NHS ester in a 10-50 molar excess to the XTEN and incubating 1-2 hrs at 25° C. Completion of the modification is monitored by analytical C18 RP-HPLC. If the conjugation efficiency is low (for example, <90%) or multiple unspecific products are formed, the DBCO-Payload A-XTEN conjugate is purified using preparative C4-C18 RP-HPLC. If the efficiency of DBCO-NHS ester conjugation is high (>90%) with no significant side products, the DBCO-Payload A-XTEN conjugate is purified from excess reagent by buffer exchange using a 10-30 kDa MWCO centrifugal device, acetonitrile precipitation or anion exchange chromatography.

[0530] To create the second XTEN-payload precursor, a Payload B-maleimide is dissolved in aqueous solution 20 mM HEPES, pH 7.0, DMF or DMCO or any other appropriate solvent depending on reagent solubility. Payload B-maleimide is added to the second cysteine-containing XTEN in 2-6 molar excess over XTEN concentration and incubated for 1 hr at 25° C. Completion of modification is monitored by analytical C18 RP-HPLC. The resulting Payload B-XTEN conjugate is purified from contaminants and reactants using preparative C4-C18 RP-HPLC. The Payload B-XTEN conjugate is formulated in 20 mM HEPES, pH 7.0, 50 mM NaCl. Azide-PEG4-NHS ester is added in 10-50 molar excess to the Payload B-XTEN and incubated 1-2 hrs at 25° C. Completion of modification is monitored by C18 RP-HPLC. If the conjugation efficiency is low (for example <90%) or multiple unspecific products are formed, the azide-Payload B-XTEN conjugate is purified using preparative C4-C18 RP-HPLC. If the efficiency of DBCO-NHS ester conjugation is high (>90%) with no significant side products, the azide-Payload B-XTEN conjugate is purified from excess reagent by buffer exchange using a 10-30 kDa MWCO centrifugal device, acetonitrile precipitation or anion exchange chromatography. The final product is created by mixing purified and concentrated DBCO-Payload A-XTEN and azide-Payload B-XTEN proteins in an equilmolar ratio in 20 mM HEPES pH 7.0 buffer, 50 mM NaCl and incubated at 25° C. for 1 hr or longer until the reaction is complete. Completion of modification is monitored by C4 or C18 RP-HPLC. If necessary, the bispecific conjugate Payload A-XTEN-Payload B is purified by preparatiove RP-HPLC, hydrophobic interaction chromatography or anion exchange chromatography.

### Example 23

### Preparation of A Trimeric Conjugate from Monospecific XTEN Precursors Linked by the N-termini

[0531] Monospecific XTEN-payload precursors will be prepared as N-terminal fusions of a Payload A linked to an XTEN molecule; e.g. of lengths ranging from AE144 to AE890, containing a single cysteine at the C-terminus. Purified precursors are formulated in 20 mM HEPES, pH 7.0, 50 mM NaCl. Tris-(2-maleimidoethyl)amine (TMEA, Thermo Scientific, cat. #33043) and dissolved in DMSO or DMF. Precursor (4-6 molar excess over cross-linker) and TMEA reagent are mixed and incubated for 1 hr at 25° C. Completion of the modification is monitored by C4 or C18 RP-HPLC or size exclusion chromatography. The resulting trivalent Payload A-XTEN conjugate is purified from protein reactants or partial product mixture by hydrophobic interaction chromatography (HIC), anion exchange chromatography or preparative C4-C18 RP-HPLC.

### Example 24

### In Vitro Serum Stability of Folate-XTEN-Drug Conjugates

[0532] As a measure of stability, folate-XTEN-drug conjugates are incubated independently in normal human, cynomolgus monkey and mouse plasma at 37° C. for up to 2 weeks with aliquots removed at periodic intervals and stored at −80° C. until analysis. The stability of folate-XTEN-drug conjugate is assessed either by the amount of free drug or the integrity of the folate-XTEN-drug conjugate over time. Free drug is quantitated with HPLC and/or LC-MS/MS whereas the amount of intact folate-XTEN-drug conjugate is determined using an XTEN/drug and/or folate/drug ELISA.

[0533] For RP-HPLC analysis, plasma samples are treated with organic solvents such as acetonitrile or acetone to precipitate proteins. Soluble fractions are evaporated under vacuum, redissolved in loading solutions and analyzed by RP-HPLC. Analytes are detected by UV absorption at wavelength specific for a particular drug, compared to known drug standards. For example, doxorubicin is detected at 480 nm. For LC-MS/MS analysis, plasma samples will be treated with organic solvents such as acetonitrile or acetone to precipitate proteins. Soluble fractions will be evaporated in vacuum, redissolved in loading solutions and analyzed by RP-HPLC. Analytes will be in-line detected and quantitated by triple quadrupole tandem mass spectrometry. Parental ion-daughter ion pairs will be determined experimentally for each drug. Calibration standards will be prepared by adding known amounts of free drug to corresponding plasma type and will be treated in parallel with experimental samples. For quantitative ELISA, optimal concentrations of antibodies for folate-XTEN-drug conjugate in the ELISAs is determined using criss-cross serial dilution analysis. An appropriate capture antibody recognizing one component of the conjugate is coated onto a 96-well microtiter plate by an overnight incubation at 4° C. The wells are blocked, washed and serum stability samples added to the wells, each at varying dilutions to allow optimal capture of the folate-XTEN-drug conjugate by the coated antibody. After washing, detection antibody recognizing another component of the conjugate is added and allowed to bind to the conjugate captured on the plate. Wells are then washed again and either streptavidin-horseradish peroxidase (complementary to biotinylated version of detection antibody) or an appropriate secondary antibody-horseradish peroxidase (complementary to non-biotinylated version of detection antibody) is then added. After appropriate incubation and a final wash step, tetramethylbenzidine (TMB) substrate is added and the plate is read at 450 nM. Concentrations of intact conjugate are then calculated for each time point by comparing the colorimetric response to a calibration curve prepared with folate-XTEN-drug in the relevant plasma type. The t1/2 of the decay of the conjugate in human, cyno and mouse serum is then defined using linear regression analysis of the log concentrations vs. time.

### Example 25

### Preparation of aHER2-XTEN-Alexa Fluor 568 Conjugate

[0534] 1x-amino,1x-thiol-XTEN (XTEN_AE864(Am1,C12), 124 nmol) in 0.5 mL of 20 mM MES pH 5.5 was neutralized with 20 uL of 1 M HEPES pH 8. The thiol of this XTEN was then reacted with 3 molar equivalents of Alexa Fluor 568 C5 Maleimide (Thermo Fisher Scientific, catalog #A20341, 372 nmol, 0.0372 mL of a 10 mM solution in anhydrous DMF). The reaction was incubated at room temperature for 2 h, and the conjugation was monitored by C18 RP-HPLC. The mixture was acidified to pH <3 with TFA, and the desired XTEN-Alexa Fluor 568 product was purified by preparative C18 RP-HPLC (C18, Phenomenex, catalog #00G-4005-NO, 250 mm x 10 mm) Chromatographic fractions were analyzed by C18 RP-HPLC. Fractions containing the desired product were pooled, neutralized with 1 M HEPES pH 8.0, and concentrated under vacuum. Selected fractions with XTEN-Alexa Fluor 568 were pooled and formulated into 20 mM HEPES pH 7.0, 50 mM NaCl using ultrafiltration (Sartorius, Vivaspin 15R, 5 kDa MWCO). High purity of the fmal product was demonstrated by C18 RP-HPLC (>98%), SD S-PAGE, and intact mass (observed ESI-MS of +13 Da). The N-terminal amine of XTEN-Alexa Fluor 568 (51.7 nmol) in 0.4 mL of 20 mM HEPES pH 7.0, 50 mM NaCl was converted to an iodoacetamide using 10 molar equivalents of SIA (517 nmol, 49 mg/mL in anhydrous DMF) at room temperature in the dark for 2 h. Excess SIA was removed by ultrafiltration (Sartorius, Vivaspin 15R, 5 kDa MWCO).

[0535] aHER2-XTEN_AE44(C36)-H8 (2 mg, 63 nmol) in 0.2 mL of 20 mM HEPES pH 7.0, 50 mM NaCl was reduced with 0.25 mM TCEP for 1.5 h at room temperature. Excess TCEP was removed by desalting column (GE, PD MiniTrap G-25), eluting in 1.5 mL of 20 mM HEPES pH 7.0, 50 mM NaCl. This reduced aHER2-XTEN was concentrated by ultrafiltration (Sartorius, Vivaspin 500, 5 kDa MWCO) to 0.09 mL in 20 mM HEPES pH 7.0, 50 mM NaCl. The cysteine side chain of reduced aHER2-XTEN_AE44(C36)-H8 (2 mg, 64 nmol) was reacted with the N-terminal iodoacetamide of IA-XTEN-Alexa Fluor 568 (51.7 nmol, 0.26 mL in 20 mM HEPES pH 7.0, 50 mM NaCl) at approximately pH 9 by addition of 0.0055 mL of 0.4 M sodium borate pH 9.95. The reaction was incubated overnight at 25° C. then checked by SDS-PAGE. The reaction mixture was diluted to 3 mL with 20 mM sodium phosphate pH 8.0 and loaded onto an immobilized metal affinity chromatography column (Toyopearl AF-Chelate 650M, 3 mL, 15 mm diameter) charged with Cu(II). Unreacted IA-XTEN-Alexa Fluor 568 was removed in the flow-through. aHER2-targeted XTEN-fluorophore conjugate was eluted with 25 mM to 100 mM imidazole in 20 mM phosphate pH 8.0. Chromatographic fractions were analyzed by SDS-PAGE. Fractions with desired conjugate were pooled and purified over a MacroCap Q column (GE Healthcare, 10 mL, 16 mm diameter), with elution using a 10 column volume gradient from 150 mM to 350 mM NaCl in 20 mM HEPES pH 7.0. Chromatographic fractions were analyzed by SDS-PAGE. Selected fractions with aHER2-targeted XTEN-fluorophore conjugate were pooled and formulated into PBS using ultrafiltration (Sartorius, Vivaspin 15R, 5 kDa MWCO). The results of SDS-PAGE and intact mass (observed ESI-MS of +16 Da) demonstrated high purity of the final product.

### Example 26

### In Vivo and Ex Vivo Imaging of aHER2-XTEN-Alexa Fluor 568 Conjugate

[0536] An Alexa Fluor 568-tagged aHER2-XTEN molecule is used as a surrogate to investigate the targeting and biodistribution efficiency of aHER2-XTEN-drug conjugates. Experiments will be carried out in nude mice bearing subcutaneous grown xenografts of HER2 positive tumor cells using in vivo, followed by ex vivo, fluorescence imaging with IVIS 50 optical imaging system (Caliper Life Sciences, Hopkinton, Mass.). In brief, female nu/nu mice bearing HER2 positive tumor cells are given a single intravenous injection of high or low dose of aHER2-XTEN-Alexa Fluor 568 and corresponding doses of non-targeting Alexa Fluor 568-tagged XTEN control. Whole body scans are acquired pre-injection and then at approximately 8, 24, 48 and 72 hours post-injection on live anesthetized animals using the IVIS 50 optical imaging system. After measuring the distribution of fluorescence in the entire animal at the last time point of 72 h, tumor and healthy organs including liver, lung, heart, spleen and kidneys are excised and their fluorescence registered and processed by the imaging system. Small and medium binning of the CCD chip is used and the exposure time optimized to obtain at least several thousand counts from the signals that were observable in each mouse in the image and to avoid saturation of the CCD chip. To normalize images for quantification, a background fluorescence image is acquired using background excitation and emission filters for the Alexa Fluor 568 spectral region. The intensity of fluorescence is expressed as different colors with blue color reflecting the lowest intensity and red being indicative of the highest intensity, and the resulting images are used to assess the uptake of the conjugates and controls.

### Example 27

### In Vivo and Ex Vivo Imaging of Folate-XTEN-Cy5.5 Conjugates

[0537] A Cy5.5 fluorescent tagged folate-XTEN molecule is used as a surrogate to investigate the targeting and biodistribution efficiency of folate-XTEN-drug conjugates. Experiments will be carried out in nude mice bearing subcutaneous grown xenografts of folate receptor positive tumor cells using in vivo, followed by ex vivo, fluorescence imaging with IVIS 50 optical imaging system (Caliper Life Sciences, Hopkinton, Mass.). As culture media contain high folate content, folate receptor positive tumor cells to be transplanted onto these mice will be grown in folate-free cell culture media containing 5-10% heat-inactivated FCS with no antibiotics. Similarly, normal rodent chow contains a high concentration of folic acid; nude mice used in this study will be maintained on folate-free diet 2 weeks prior to tumor implantation and for the duration of the imaging analysis to reduce serum folate concentration.

[0538] In brief, female nu/nu mice bearing folate receptor positive tumor cells are given a single intravenous injection of high or low dose folate-XTEN-Cy5.5 and corresponding doses of non-targeting Cy5.5 tagged XTEN control. Whole body scans are acquired pre-injection and then at approximately 8, 24, 48 and 72 hours post-injection on live anesthetized animals using the IVIS 50 optical imaging system. After measuring the distribution of fluorescence in the entire animal at the last time point of 72 h, tumor and healthy organs including liver, lung, heart, spleen and kidneys are excised and their fluorescence registered and processed by the imaging system. Cy5.5 excitation (615-665 nm) and emission (695-770 nm) filters are selected to match the fluorescence agents' wavelengths. Small and medium binning of the CCD chip is used and the exposure time optimized to obtain at least several thousand counts from the signals that were observable in each mouse in the image and to avoid saturation of the CCD chip. To normalize images for quantification, a background fluorescence image is acquired using background excitation and emission filters for the Cy5.5 spectral region. The intensity of fluorescence is expressed as different colors with blue color reflecting the lowest intensity and red being indicative of the highest intensity, and the resulting images are used to assess the uptake of the conjugates and controls.

### Example 28

### Human Clinical Trial Designs for Evaluating Folate-XTEN-Drug Conjugates

[0539] Targeted chemotherapy is a modern approach aimed at increasing the efficacy of systemic chemotherapy and reducing its side effects. Folate, also known as folic acid, vitamin B₉, is a vital nutrient required by all living cells for nucleotide biosynthesis and function as cofactor in certain biological pathways. The folate receptor is a focus for the development of therapies to treat fast dividing malignancies; in particular ovarian cancer and non-small cell lung carcinoma. While folate receptor expression is negligible in normal ovary, ˜90% of epithelial ovarian cancers overexpress the folate receptor, as do many lung adenocarinomas, thereby opening the possibility of directed therapies. Fusion of a XTEN carrying ≥1 copy of folate to a XTEN bearing ≥3 drug molecules to create a targeted peptide-drug conjugate is expected to improve the therapeutic index and the extended half-life will enable dosing at levels way below maximum tolerated dose (MTD), reduce dosing frequency and cost (reduced drug required per dose).

[0540] Clinical evaluation of folate-XTEN-drug composition is conducted in patients with relapsed or refractory advanced tumors or in patients suffering from platinum-resistant ovarian cancer and non-small cell lung carcinoma who have failed using other chemotherapies. Clinical trials are designed to determine the efficacy and advantages of the folate-XTEN-drug conjugate over standard therapies in humans Such studies in patients would comprise three phases. First, a Phase I safety and pharmacokinetics study is conducted to determine the MTD and to characterize the dose-limiting toxicity, pharmacokinetics and preliminary pharmacodynamics in humans. These initial studies could be performed in patients with folate receptor positive status that have relapsed or have refractory advanced tumors and for which standard curative or palliative measures could not be used or were no longer effective or tolerated. The phase I study would use single escalating doses of folate-XTEN-drug conjugate and would measure biochemical, PK, and clinical parameters to permit the determination of the MTD and establish the threshold and maximum concentrations in dosage and in circulating drug that constitute the therapeutic window to be used in subsequent Phase II and Phase III trials as well as defining potential toxicities and adverse events to be tracked in future studies.

[0541] Phase II clinical studies of human patients would be independently conducted in folate receptor positive platinum-resistant ovarian cancer patient population, non-small cell lung carcinoma patients having failed numerous chemotherapies, and patients suffering from relapsed or refractory advanced tumors. The trials would evaluate the efficacy and safety of folate-XTEN-drug conjugate alone and in combination with a current chemotherapy employed in the specific indication. Patients will receive intravenously administered folate-XTEN-drug conjugate at a dose level and regimen determined in the Phase I study with or without the standard chemotherapy agent. A control arm comprising of the chemotherapy agent plus placebo would be included. The primary endpoint would be response rate as defined by the Response Evaluation Criteria in Solid Tumors (RECIST). Secondary endpoints will include safety and tolerability, time-to-progression and overall survival.

[0542] A phase III efficacy and safety study is conducted in folate-receptor positive platinum-resistant ovarian cancer patients, non-small cell lung carcinoma patients, or advanced tumor relapsed or refractory patients cancer patients to test ability to reach statistically significant clinical endpoints such as progression-free-survival as measured by RECIST. The trial will also be statistically powered for overall survival as a secondary endpoint with projected enrollment in excess of 400 patients. Efficacy outcomes are determined using standard statistical methods. Toxicity and adverse event markers are also followed in the study to verify that the compound is safe when used in the manner described.

### Example 29

### Biodegradation of XTEN in Tissue Homogenate

[0543] Purified XTEN_AE864 protein was incubated at a final concentration of 0.3 mg/ml in rat plasma (Bioreclamation IVT, Baltimore, Md.), rat kidney homogenate (Bioreclamation), or PBS buffer for up to 7 days at 37° C. Samples were withdrawn at time 0, 4 hours, 24 hours, and 7 days, were immediately frozen and stored at -80° C., then thawed right before analysis. XTEN was extracted from the samples by methanol precipitation. Briefly, methanol pre-chilled at −20° C. was added to the samples at a volume ratio of 2:1 and mixed by vortex. The mixture was kept at −20° C. for 30 min and then centrifuged at 14,000 rpm for 20 min at 8° C. The supernatant was subjected to centrifugal evaporation for 1-2 hours to take the sample to complete dryness, and was then resuspended in PBS buffer to the original volume before methanol extraction. The reconstituted samples were analyzed by SDS-PAGE with staining using Stains-all. The results are shown in FIG. 26. The XTEN_AE864 showed only minor signs of degradation over the 7 day incubation period in both plasma and PBS buffer. However, XTEN_AE864 was rapidly degraded in rat kidney by the 24 hour interval.

### Example 30

### Characterization of Secondary Structure of XTEN

[0544] Purified XTEN_AE864 was evaluated for the degree of secondary structure by circular dichroism spectroscopy. CD spectroscopy was performed on a Jasco J850 spectrometer (Jasco, Inc., Easton, Md.) with a Peltier thermal cell holder. The concentration of protein was adjusted to 0.2 mg/mL in 13 mM sodium phosphate buffer at pH 7.2, or 20 mM sodium acetate buffer at pH 4.0. The experiments were carried out using quartz cells with an optical path length of 0.1 cm. The CD spectra were acquired at 20° C. All spectra were recorded in four replicates from 300 nm to 180 nm using a bandwidth of 1 nm. The CD spectra showed similar profiles for XTEN_AE864 at both pH 7.2 and pH 4.0 (FIG. 27) The data are consistent with the spectra of an unstructured polypeptide, where there is no evidence of stable secondary structure.

### Example 31

### Increasing Solubility and Stability of a Peptide Payload by Linking to XTEN

[0545] In order to evaluate the ability of XTEN to enhance the physicochemical properties of solubility and stability, fusion proteins of glucagon plus shorter-length XTEN were prepared and evaluated. The test articles were prepared in Tris-buffered saline at neutral pH and characterization of the Gcg-XTEN solution was by reverse-phase HPLC and size exclusion chromatography to affirm that the protein was homogeneous and non-aggregated in solution. The data are presented in Table 35. For comparative purposes, the solubility limit of unmodified glucagon in the same buffer was measured at 60 μM (0.2 mg/mL), and the result demonstrate that for all lengths of XTEN added, a substantial increase in solubility was attained. Importantly, in most cases the glucagon-XTEN fusion proteins were prepared to achieve target concentrations and were not evaluated to determine the maximum solubility limits for the given construct. However, in the case of glucagon linked to the AF-144 XTEN, the limit of solubility was determined, with the result that a 60-fold increase in solubility was achieved, compared to glucagon not linked to XTEN. In addition, the glucagon-AF144 was evaluated for stability, and was found to be stable in liquid formulation for at least 6 months under refrigerated conditions and for approximately one month at 37° C. (data not shown).

[0546] The data support the conclusion that the linking of short-length XTEN polypeptides to a biologically active protein such as glucagon can markedly enhance the solubility properties of the protein by the resulting fusion protein, as well as confer stability at the higher protein concentrations.

TABLE 35
Solubility of Glucagon-XTEN constructs

| Test Article | Solubility | |
|---|---|---|
| Glucagon | 60 | μM |
| Glucagon-Y36 | >370 | μM |
| Glucagon-Y72 | >293 | μM |
| Glucagon-AF108 | >145 | μM |
| Glucagon-AF120 | >160 | μM |
| Glucagon-Y144 | >497 | μM |
| Glucagon-AE144 | >467 | μM |
| Glucagon-AF144 | >3600 | μM |
| Glucagon-Y288 | >163 | μM |

### Example 32

### Analysis of Polypeptide Sequences for Repetitiveness

[0547] In this Example, different polypeptides, including several XTEN sequences, were assessed for repetitiveness in the amino acid sequence. Polypeptide amino acid sequences can be assessed for repetitiveness by quantifying the number of times a shorter subsequence appears within the overall polypeptide. For example, a polypeptide of 200 amino acid residues length has a total of 165 overlapping 36-amino acid “blocks” (or “36-mers”) and 198 3-mer “subsequences”, but the number of unique 3-mer subsequences will depend on the amount of repetitiveness within the sequence. For the analyses, different polypeptide sequences were assessed for repetitiveness by determining the average subsequence score obtained by application of the following equation:

$$Average subsequence score = \frac{{\sum }_{i = 1}^{n} ( \frac{{Count}_{i}}{m} )}{n}$$

where: n=(amino acid length of polypeptide)−(amino acid length of block)+1;

m=(amino acid length of block)−(amino acid length of subsequence)+1; and

Count,=cumulative number of occurrences of each unique subsequence within block,

In the analyses of the present Example, the average subsequence score for the polypeptides of Table 36 were determined using the foregoing equation in a computer program wherein the block length was set at 36 amino acids and the subsequence length was set at 3 amino acids. The resulting average subsequence score is a reflection of the degree of repetitiveness within the polypeptide.

[0548] The results, shown in Table 36, indicate that the polypeptides consisting of 2 or 3 amino acid types have high average subsequence scores and, hence, a high degree of repetitiveness, while XTEN designed with only four types of 12 amino acids motifs (e.g., motifs from a family of Table 9), each consisting of four to six amino acids (i.e., G, S, T, E, P, and A) in a non-repetitive sequence, have average subsequence scores of less than 3 and, in many cases, less than 2, reflecting a low degree of repetitiveness across the entire sequence. For example, the L288 sequence has two amino acid types and has short, highly repetitive block sequences, resulting in a average subsequence score of 8.5. The polypeptide J288 has three amino acid types but also has short, repetitive block sequences, resulting in a average subsequence score of 5.7. Y576 also has three amino acid types, but is not made of internal repeats, reflected in the average subsequence score of 4.7. W576 consists of four types of amino acids, but has a higher degree of internal repetitiveness with the blocks, e.g., “GGSG” (SEQ ID NO: 731), resulting in a average subsequence score of 4.3. The XTEN AD576 consists of four types of 12 amino acid motifs, each consisting of four types of amino acids. Because of the low degree of internal repetitiveness of the individual motifs, the overall average subsequence score amino acids is 2.5. In contrast, the XTEN's consisting of four motifs containing six types of amino acids, each with a low degree of internal repetitiveness, have average subsequence scores less than 2. For the XTEN sequences AE864 and AG864, the output of the program was graphed to show the variation in repetitiveness over the length of the sequence. For AE864 and AG864, the output in which the individual subsequence score for each of the sequential 36-mer blocks were plotted as individual points corresponding to the start of each block as the amino acid number in the sequence in the X axis versus the subsequence scores for the corresponding blocks in the Y-axis showed that for AE864 the sequence, which has an overall average subsequence score of 1.7, varies between scores of 1 and 2 for much of the sequence, but has areas of higher repetitiveness starting around amino acid 330, 505, and 725. Conversely, there are approximately 10 blocks where the subsequence score approaches 1, a score that represents a complete lack of repetitiveness. Similarly, the graph for AG864 showed that the sequence, which has an overall average subsequence score of 1.9, varies between scores of 1.2 and 2 for much of the sequence, but has four areas of higher repetitiveness where the subsequence scores are above 3.

[0549] Conclusions: The results indicate that the combination of 12 amino acid subsequence motifs, each consisting of four to six amino acid types that are essentially non-repetitive, into a longer XTEN polypeptide results in an overall sequence that is substantially non-repetitive, as indicated by overall average subsequence scores less than 3 and, in many cases, less than 2. This is despite the fact that each subsequence motif may be used multiple times across the sequence. In contrast, polymers created from smaller numbers of amino acid types resulted in higher average subsequence scores, with polypeptides consisting of two amino acid type having higher scores that those consisting of three amino acid types.

TABLE 36
Average subsequence score calculations of nolvueutide sequences

| | | | SEQ ID |
|---|---|---|---|
| Seq Name | Amino Acid Sequence | Score | NO: |
| H288 | GSGGEGGSGGSGGSGGEGGSGGSGGSGGEGGSGGSGGSGGEG | 7.1 | 732 |
| | GSGGSGGSGGEGGSGGSGGSGGEGGSGGSGGSGGEGGSGGSG | | |
| | GSGGEGGSGGSGGSGGEGGSGGSGGSGGEGGSGGSGGSGGEG | | |
| | GSGGSGGSGGEGGSGGSGGSGGEGGSGGSGGSGGEGGSGGSG | | |
| | GSGGEGGSGGSGGSGGEGGSGGSGGSGGEGGSGGSGGSGGEG | | |
| | GSGGSGGSGGEGGSGGSGGSGGEGGSGGSGGSGGEGGSGGSG | | |
| | GSGGEGGSGGSGGSGGEGGSGGSGGSGGEGGSGGSG | | |
| J288 | GSGGEGGSGGEGGSGGEGGSGGEGGSGGEGGSGGEGGSGGEG | 5.7 | 733 |
| | GSGGEGGSGGEGGSGGEGGSGGEGGSGGEGGSGGEGGSGGEG | | |
| | GSGGEGGSGGEGGSGGEGGSGGEGGSGGEGGSGGEGGSGGEG | | |
| | GSGGEGGSGGEGGSGGEGGSGGEGGSGGEGGSGGEGGSGGEG | | |
| | GSGGEGGSGGEGGSGGEGGSGGEGGSGGEGGSGGEGGSGGEG | | |
| | GSGGEGGSGGEGGSGGEGGSGGEGGSGGEGGSGGEGGSGGEG | | |
| | GSGGEGGSGGEGGSGGEGGSGGEGGSGGEGGSGGEG | | |
| K288 | GEGEGGGEGGEGEGGGEGGEGEGGGEGGEGEGGGEGGEGEGG | 8.0 | 734 |
| | GEGGEGEGGGEGGEGEGGGEGGEGEGGGEGGEGEGGGEGGEG | | |
| | EGGGEGGEGEGGGEGGEGEGGGEGGEGEGGGEGGEGEGGGEG | | |
| | GEGEGGGEGGEGEGGGEGGEGEGGGEGGEGEGGGEGGEGEGG | | |
| | GEGGEGEGGGEGGEGEGGGEGGEGEGGGEGGEGEGGGEGGEG | | |
| | EGGGEGGEGEGGGEGGEGEGGGEGGEGEGGGEGGEGEGGGEG | | |
| | GEGEGGGEGGEGEGGGEGGEGEGGGEGGEGEGGGEG | | |
| L288 | SSESSESSSSESSSESSESSSSESSSESSESSSSESSSESSESSSSESSS | 8.5 | 735 |
| | ESSESSSSESSSESSESSSSESSSESSESSSSESSSESSESSSSESSSES | | |
| | SESSSSESSSESSESSSSESSSESSESSSSESSSESSESSSSESSSESSE | | |
| | SSSSESSSESSESSSSESSSESSESSSSESSSESSESSSSESSSESSESS | | |
| | SSESSSESSESSSSESSSESSESSSSESSSESSESSSSESSSESSESSSS | | |
| | ESSSESSESSSSESSSESSESSSSESSSESSESSSSES | | |
| Y288 | GEGSGEGSEGEGSEGSGEGEGSEGSGEGEGGSEGSEGEGGSEGS | 4.7 | 736 |
| | EGEGGSEGSEGEGSGEGSEGEGGSEGSEGEGSGEGSEGEGSEGG | | |
| | SEGEGGSEGSEGEGSGEGSEGEGGEGGSEGEGSEGSGEGEGSGE | | |
| | GSEGEGSEGSGEGEGSGEGSEGEGSEGSGEGEGSEGSGEGEGGS | | |
| | EGSEGEGSEGSGEGEGGEGSGEGEGSGEGSEGEGGGEGSEGEGS | | |
| | GEGGEGEGSEGGSEGEGGSEGGEGEGSEGSGEGEGSEGGSEGE | | |
| | GSEGGSEGEGSEGSGEGEGSEGSGE | | |
| AE42_1 | TEPSEGSAPGSPAGSPTSTEEGTSESATPESGPGSEPATSGS | 1.2 | 737 |
| AE42_2 | PAGSPTSTEEGTSTEPSEGSAPGTSESATPESGPGSEPATSG | 1.2 | 738 |
| AE42_3 | SEPATSGSETPGTSESATPESGPGTSTEPSEGSAPGSPAGSP | 1.1 | 739 |
| AG42_1 | GAPSPSASTGTGPGTPGSGTASSSPGSSTPSGATGSPGPSGP | 1.1 | 740 |
| AG42_2 | GPGTPGSGTASSSPGSSTPSGATGSPGSSPSASTGTGPGASP | 1.3 | 741 |
| AG42_3 | SPSASTGTGPGASPGTSSTGSPGTPGSGTASSSPGSSTPSGA | 1.4 | 742 |
| AG42_4 | SASTGTGPGASPGTSSTGSPGTPGSGTASSSPGSSTPSGATG | 1.4 | 743 |
| AE48 | MAEPAGSPTSTEEGTPGSGTASSSPGSSTPSGATGSPGASPGTSST | 1.2 | 744 |
| | GS | | |
| AM48 | MAEPAGSPTSTEEGASPGTSSTGSPGSSTPSGATGSPGSSTPSGAT | 1.7 | 745 |
| | GS | | |
| AE144 | GSEPATSGSETPGTSESATPESGPGSEPATSGSETPGSPAGSPTST | 1.6 | 746 |
| | EEGTSTEPSEGSAPGSEPATSGSETPGSEPATSGSETPGSEPATSG | | |
| | SETPGTSTEPSEGSAPGTSESATPESGPGSEPATSGSETPGTSTEPS | | |
| | EGSAP | | |
| AF144 | GTSTPESGSASPGTSPSGESSTAPGTSPSGESSTAPGSTSSTAESPG | 1.7 | 747 |
| | PGSTSESPSGTAPGSTSSTAESPGPGTSPSGESSTAPGTSTPESGSA | | |
| | SPGSTSSTAESPGPGTSPSGESSTAPGTSPSGESSTAPGTSPSGESS | | |
| | TAP | | |
| AG144_1 | PGSSPSASTGTGPGSSPSASTGTGPGTPGSGTASSSPGSSTPSGAT | 1.6 | 748 |
| | GSPGSSPSASTGTGPGASPGTSSTGSPGTPGSGTASSSPGSSTPSG | | |
| | ATGSPGTPGSGTASSSPGASPGTSSTGSPGASPGTSSTGSPGTPGS | | |
| | GTASSS | | |
| AG144_2 | SGTASSSPGSSTPSGATGSPGTPGSGTASSSPGSSTPSGATGSPGS | 1.7 | 749 |
| | STPSGATGSPGSSPSASTGTGPGSSPSASTGTGPGASPGTSSTGSP | | |
| | GTPGSGTASSSPGSSTPSGATGSPGSSPSASTGTGPGSSPSASTGT | | |
| | GPGASP | | |
| AG144_3 | GTPGSGTASSSPGSSTPSGATGSPGSSTPSGATGSPGSSPSASTGT | 1.7 | 750 |
| | GPGSSPSASTGTGPGASPGTSSTGSPGTPGSGTASSSPGSSTPSGA | | |
| | TGSPGSSPSASTGTGPGSSPSASTGTGPGASPGTSSTGSPGASPGT | | |
| | SSTGSP | | |
| AG144_4 | GTPGSGTASSSPGSSTPSGATGSPGSSPSASTGTGPGSSPSASTGT | 1.7 | 751 |
| | GPGASPGTSSTGSPGASPGTSSTGSPGSSTPSGATGSPGSSPSAST | | |
| | GTGPGASPGTSSTGSPGSSPSASTGTGPGTPGSGTASSSPGSSTPS | | |
| | GATGSP | | |
| AE288 | GTSESATPESGPGSEPATSGSETPGTSESATPESGPGSEPATSGSE | 1.6 | 752 |
| | TPGTSESATPESGPGTSTEPSEGSAPGSPAGSPTSTEEGTSESATP | | |
| | ESGPGSEPATSGSETPGTSESATPESGPGSPAGSPTSTEEGSPAGS | | |
| | PTSTEEGTSTEPSEGSAPGTSESATPESGPGTSESATPESGPGTSES | | |
| | ATPESGPGSEPATSGSETPGSEPATSGSETPGSPAGSPTSTEEGTS | | |
| | TEPSEGSAPGTSTEPSEGSAPGSEPATSGSETPGTSESATPESGPG | | |
| | TSTEPSEGSAP | | |
| AG288_1 | PGASPGTSSTGSPGASPGTSSTGSPGTPGSGTASSSPGSSTPSGAT | 1.8 | 753 |
| | GSPGTPGSGTASSSPGSSTPSGATGSPGTPGSGTASSSPGSSTPSG | | |
| | ATGSPGSSTPSGATGSPGSSPSASTGTGPGSSPSASTGTGPGASPG | | |
| | TSSTGSPGTPGSGTASSSPGSSTPSGATGSPGSSPSASTGTGPGSS | | |
| | PSASTGTGPGASPGTSSTGSPGASPGTSSTGSPGSSTPSGATGSPG | | |
| | SSPSASTGTGPGASPGTSSTGSPGSSPSASTGTGPGTPGSGTASSS | | |
| | PGSSTPSGATGS | | |
| AG288_2 | GSSPSASTGTGPGSSPSASTGTGPGTPGSGTASSSPGSSTPSGATG | 1.8 | 754 |
| | SPGSSPSASTGTGPGASPGTSSTGSPGTPGSGTASSSPGSSTPSGA | | |
| | TGSPGTPGSGTASSSPGASPGTSSTGSPGASPGTSSTGSPGTPGSG | | |
| | TASSSPGSSTPSGATGSPGASPGTSSTGSPGTPGSGTASSSPGSST | | |
| | PSGATGSPGSSPSASTGTGPGSSPSASTGTGPGSSTPSGATGSPGS | | |
| | STPSGATGSPGASPGTSSTGSPGASPGTSSTGSPGASPGTSSTGSP | | |
| | GTPGSGTASSSP | | |
| AD576 | GSSESGSSEGGPGSGGEPSESGSSGSSESGSSEGGPGSSESGSSEG | 2.5 | 755 |
| | GPGSSESGSSEGGPGSSESGSSEGGPGSSESGSSEGGPGESPGGSS | | |
| | GSESGSEGSSGPGESSGSSESGSSEGGPGSSESGSSEGGPGSSESG | | |
| | SSEGGPGSGGEPSESGSSGESPGGSSGSESGESPGGSSGSESGSGG | | |
| | EPSESGSSGSSESGSSEGGPGSGGEPSESGSSGSGGEPSESGSSGS | | |
| | EGSSGPGESSGESPGGSSGSESGSGGEPSESGSSGSGGEPSESGSS | | |
| | GSGGEPSESGSSGSSESGSSEGGPGESPGGSSGSESGESPGGSSGS | | |
| | ESGESPGGSSGSESGESPGGSSGSESGESPGGSSGSESGSSESGSS | | |
| | EGGPGSGGEPSESGSSGSEGSSGPGESSGSSESGSSEGGPGSGGEP | | |
| | SESGSSGSSESGSSEGGPGSGGEPSESGSSGESPGGSSGSESGESP | | |
| | GGSSGSESGSSESGSSEGGPGSGGEPSESGSSGSSESGSSEGGPGS | | |
| | GGEPSESGSSGSGGEPSESGSSGESPGGSSGSESGSEGSSGPGESS | | |
| | GSSESGSSEGGPGSEGSSGPGESS | | |
| AE576 | AGSPAGSPTSTEEGTSESATPESGPGTSTEPSEGSAPGSPAGSPTS | 1.7 | 756 |
| | TEEGTSTEPSEGSAPGTSTEPSEGSAPGTSESATPESGPGSEPATS | | |
| | GSETPGSEPATSGSETPGSPAGSPTSTEEGTSESATPESGPGTSTE | | |
| | PSEGSAPGTSTEPSEGSAPGSPAGSPTSTEEGTSTEPSEGSAPGTS | | |
| | TEPSEGSAPGTSESATPESGPGTSTEPSEGSAPGTSESATPESGPG | | |
| | SEPATSGSETPGTSTEPSEGSAPGTSTEPSEGSAPGTSESATPESGP | | |
| | GTSESATPESGPGSPAGSPTSTEEGTSESATPESGPGSEPATSGSE | | |
| | TPGTSESATPESGPGTSTEPSEGSAPGTSTEPSEGSAPGTSTEPSE | | |
| | GSAPGTSTEPSEGSAPGTSTEPSEGSAPGTSTEPSEGSAPGSPAGS | | |
| | PTSTEEGTSTEPSEGSAPGTSESATPESGPGSEPATSGSETPGTSES | | |
| | ATPESGPGSEPATSGSETPGTSESATPESGPGTSTEPSEGSAPGTS | | |
| | ESATPESGPGSPAGSPTSTEEGSPAGSPTSTEEGSPAGSPTSTEEG | | |
| | TSESATPESGPGTSTEPSEGSAP | | |
| AF540 | GSTSSTAESPGPGSTSSTAESPGPGSTSESPSGTAPGSTSSTAESPG | 1.8 | 757 |
| | PGSTSSTAESPGPGTSTPESGSASPGSTSESPSGTAPGTSPSGESST | | |
| | APGSTSESPSGTAPGSTSESPSGTAPGTSPSGESSTAPGSTSESPSG | | |
| | TAPGSTSESPSGTAPGTSPSGESSTAPGSTSESPSGTAPGSTSESPS | | |
| | GTAPGSTSESPSGTAPGTSTPESGSASPGSTSESPSGTAPGTSTPES | | |
| | GSASPGSTSSTAESPGPGSTSSTAESPGPGTSTPESGSASPGTSTPE | | |
| | SGSASPGSTSESPSGTAPGTSTPESGSASPGTSTPESGSASPGSTSE | | |
| | SPSGTAPGSTSESPSGTAPGSTSESPSGTAPGSTSSTAESPGPGTST | | |
| | PESGSASPGTSTPESGSASPGSTSESPSGTAPGSTSESPSGTAPGTS | | |
| | TPESGSASPGSTSESPSGTAPGSTSESPSGTAPGTSTPESGSASPGT | | |
| | SPSGESSTAPGSTSSTAESPGPGTSPSGESSTAPGSTSSTAESPGPG | | |
| | TSTPESGSASPGSTSESPSGTAP | | |
| AF504 | GASPGTSSTGSPGSSPSASTGTGPGSSPSASTGTGPGTPGSGTASS | 1.9 | 758 |
| | SPGSSTPSGATGSPGSNPSASTGTGPGASPGTSSTGSPGTPGSGTA | | |
| | SSSPGSSTPSGATGSPGTPGSGTASSSPGASPGTSSTGSPGASPGT | | |
| | SSTGSPGTPGSGTASSSPGSSTPSGATGSPGASPGTSSTGSPGTPG | | |
| | SGTASSSPGSSTPSGATGSPGSNPSASTGTGPGSSPSASTGTGPGS | | |
| | STPSGATGSPGSSTPSGATGSPGASPGTSSTGSPGASPGTSSTGSP | | |
| | GASPGTSSTGSPGTPGSGTASSSPGASPGTSSTGSPGASPGTSSTG | | |
| | SPGASPGTSSTGSPGSSPSASTGTGPGTPGSGTASSSPGASPGTSS | | |
| | TGSPGASPGTSSTGSPGASPGTSSTGSPGSSTPSGATGSPGSSTPS | | |
| | GATGSPGASPGTSSTGSPGTPGSGTASSSPGSSTPSGATGSPGSST | | |
| | PSGATGSPGSSTPSGATGSPGSSPSASTGTGPGASPGTSSTGSP | | |
| AGS576 | PGTPGSGTASSSPGSSTPSGATGSPGSSPSASTGTGPGSSPSASTG | 2.1 | 759 |
| | TGPGSSTPSGATGSPGSSTPSGATGSPGASPGTSSTGSPGASPGTS | | |
| | STGSPGASPGTSSTGSPGTPGSGTASSSPGASPGTSSTGSPGASPG | | |
| | TSSTGSPGASPGTSSTGSPGSSPSASTGTGPGTPGSGTASSSPGAS | | |
| | PGTSSTGSPGASPGTSSTGSPGASPGTSSTGSPGSSTPSGATGSPG | | |
| | SSTPSGATGSPGASPGTSSTGSPGTPGSGTASSSPGSSTPSGATGS | | |
| | PGSSTPSGATGSPGSSTPSGATGSPGSSPSASTGTGPGASPGTSST | | |
| | GSPGASPGTSSTGSPGTPGSGTASSSPGASPGTSSTGSPGASPGTS | | |
| | STGSPGASPGTSSTGSPGASPGTSSTGSPGTPGSGTASSSPGSSTP | | |
| | SGATGSPGTPGSGTASSSPGSSTPSGATGSPGTPGSGTASSSPGSS | | |
| | TPSGATGSPGSSTPSGATGSPGSSPSASTGTGPGSSPSASTGTGPG | | |
| | ASPGTSSTGSPGTPGSGTASSSPGSSTPSGATGSPGSSPSASTGTG | | |
| | PGSSPSASTGTGPGASPGTSSTGS | | |
| AD836 | GSSESGSSEGGPGSSESGSSEGGPGESPGGSSGSESGSGGEPSESG | 2.5 | 760 |
| | SSGESPGGSSGSESGESPGGSSGSESGSSESGSSEGGPGSSESGSS | | |
| | EGGPGSSESGSSEGGPGESPGGSSGSESGESPGGSSGSESGESPGG | | |
| | SSGSESGSSESGSSEGGPGSSESGSSEGGPGSSESGSSEGGPGSSE | | |
| | SGSSEGGPGSSESGSSEGGPGSSESGSSEGGPGSGGEPSESGSSGE | | |
| | SPGGSSGSESGESPGGSSGSESGSGGEPSESGSSGSEGSSGPGESS | | |
| | GSSESGSSEGGPGSGGEPSESGSSGSEGSSGPGESSGSSESGSSEG | | |
| | GPGSGGEPSESGSSGESPGGSSGSESGSGGEPSESGSSGSGGEPSE | | |
| | SGSSGSSESGSSEGGPGSGGEPSESGSSGSGGEPSESGSSGSEGSS | | |
| | GPGESSGESPGGSSGSESGSEGSSGPGESSGSEGSSGPGESSGSGG | | |
| | EPSESGSSGSSESGSSEGGPGSSESGSSEGGPGESPGGSSGSESGS | | |
| | GGEPSESGSSGSEGSSGPGESSGESPGGSSGSESGSEGSSGPGSSE | | |
| | SGSSEGGPGSGGEPSESGSSGSEGSSGPGESSGSEGSSGPGESSGS | | |
| | EGSSGPGESSGSGGEPSESGSSGSGGEPSESGSSGESPGGSSGSES | | |
| | GESPGGSSGSESGSGGEPSESGSSGSEGSSGPGESSGESPGGSSGS | | |
| | ESGSSESGSSEGGPGSSESGSSEGGPGSSESGSSEGGPGSGGEPSE | | |
| | SGSSGSSESGSSEGGPGESPGGSSGSESGSGGEPSESGSSGSSESG | | |
| | SSEGGPGESPGGSSGSESGSGGEPSESGSSGESPGGSSGSESGSGG | | |
| | EPSESGSS | | |
| AE864 | GSPAGSPTSTEEGTSESATPESGPGTSTEPSEGSAPGSPAGSPTST | 1.7 | 761 |
| | EEGTSTEPSEGSAPGTSTEPSEGSAPGTSESATPESGPGSEPATSG | | |
| | SETPGSEPATSGSETPGSPAGSPTSTEEGTSESATPESGPGTSTEPS | | |
| | GSAPGTSTEPSEGSAPGSPAGSPTSTEEGTSTEPSEGSAPGTSTE | | |
| | PSEGSAPGTSESATPESGPGTSTEPSEGSAPGTSESATPESGPGSE | | |
| | PATSGSETPGTSTEPSEGSAPGTSTEPSEGSAPGTSESATPESGPG | | |
| | TSESATPESGPGSPAGSPTSTEEGTSESATPESGPGSEPATSGSETP | | |
| | GTSESATPESGPGTSTEPSEGSAPGTSTEPSEGSAPGTSTEPSEGS | | |
| | APGTSTEPSEGSAPGTSTEPSEGSAPGTSTEPSEGSAPGSPAGSPT | | |
| | STEEGTSTEPSEGSAPGTSESATPESGPGSEPATSGSETPGTSESA | | |
| | TPESGPGSEPATSGSETPGTSESATPESGPGTSTEPSEGSAPGTSES | | |
| | ATPESGPGSPAGSPTSTEEGSPAGSPTSTEEGSPAGSPTSTEEGTS | | |
| | ESATPESGPGTSTEPSEGSAPGTSESATPESGPGSEPATSGSETPG | | |
| | TSESATPESGPGSEPATSGSETPGTSESATPESGPGTSTEPSEGSAP | | |
| | GSPAGSPTSTEEGTSESATPESGPGSEPATSGSETPGTSESATPES | | |
| | GPGSPAGSPTSTEEGSPAGSPTSTEEGTSTEPSEGSAPGTSESATP | | |
| | ESGPGTSESATPESGPGTSESATPESGPGSEPATSGSETPGSEPAT | | |
| | SGSETPGSPAGSPTSTEEGTSTEPSEGSAP | | |
| AF864 | GSTSSTAESPGPGSTSSTAESPGPGSTSESPSGTAPGSTSSTAESPG | 1.8 | 762 |
| | PGSTSSTAESPGPGTSTPESGSASPGSTSESPSGTAPGTSPSGESST | | |
| | APGSTSESPSGTAPGSTSESPSGTAPGTSPSGESSTAPGSTSESPSG | | |
| | TAPGSTSESPSGTAPGTSPSGESSTAPGSTSESPSGTAPGSTSESPS | | |
| | GTAPGSTSESPSGTAPGTSTPESGSASPGSTSESPSGTAPGTSTPES | | |
| | GSASPGSTSSTAESPGPGSTSSTAESPGPGTSTPESGSASPGTSTPE | | |
| | SGSASPGSTSESPSGTAPGTSTPESGSASPGTSTPESGSASPGSTSE | | |
| | SPSGTAPGSTSESPSGTAPGSTSESPSGTAPGSTSSTAESPGPGTST | | |
| | PESGSASPGTSTPESGSASPGSTSESPSGTAPGSTSESPSGTAPGTS | | |
| | TPESGSASPGSTSESPSGTAPGSTSESPSGTAPGTSTPESGSASPGT | | |
| | SPSGESSTAPGSTSSTAESPGPGTSPSGESSTAPGSTSSTAESPGPG | | |
| | TSTPESGSASPGSTSESPSGTAPGSTSSTAESPGPGTSTPESGSASP | | |
| | GTSTPESGSASPGSTSSTAESPGPGTSPSGESSTAPGTSTPESGSAS | | |
| | PGSTSESPSGTAPGSTSESPSGTAPGTSTPESGSASPGTSPSGESST | | |
| | APGSTSSTAESPGPGTSPSGESSTAPGSTSSTAESPGPGSTSSTAES | | |
| | PGPGTSPSGESSTAPGSTSESPSGTAPGSTSESPSGTAPGTSTPESG | | |
| | SASPGSTSESPSGTAPGSTSESPSGTAPGTSTPESGSASPGSTSESP | | |
| | SGTAPGSTSESPSGTAPGSTSESPSGTAPGSTSSTAESPGPGTSPS | | |
| | GESSTAPGTSPSGESSTAP | | |
| AG864 | GASPGTSSTGSPGSSPSASTGTGPGSSPSASTGTGPGTPGSGTASS | 1.9 | 763 |
| | SPGSSTPSGATGSPGSSPSASTGTGPGASPGTSSTGSPGTPGSGTA | | |
| | SSSPGSSTPSGATGSPGTPGSGTASSSPGASPGTSSTGSPGASPGT | | |
| | SSTGSPGTPGSGTASSSPGSSTPSGATGSPGASPGTSSTGSPGTPG | | |
| | SGTASSSPGSSTPSGATGSPGSSPSASTGTGPGSSPSASTGTGPGS | | |
| | STPSGATGSPGSSTPSGATGSPGASPGTSSTGSPGASPGTSSTGSP | | |
| | GASPGTSSTGSPGTPGSGTASSSPGASPGTSSTGSPGASPGTSSTG | | |
| | SPGASPGTSSTGSPGSSPSASTGTGPGTPGSGTASSSPGASPGTSS | | |
| | TGSPGASPGTSSTGSPGASPGTSSTGSPGSSTPSGATGSPGSSTPS | | |
| | GATGSPGASPGTSSTGSPGTPGSGTASSSPGSSTPSGATGSPGSST | | |
| | PSGATGSPGSSTPSGATGSPGSSPSASTGTGPGASPGTSSTGSPGA | | |
| | SPGTSSTGSPGTPGSGTASSSPGASPGTSSTGSPGASPGTSSTGSP | | |
| | GASPGTSSTGSPGASPGTSSTGSPGTPGSGTASSSPGSSTPSGATG | | |
| | SPGTPGSGTASSSPGSSTPSGATGSPGTPGSGTASSSPGSSTPSGA | | |
| | TGSPGSSTPSGATGSPGSSPSASTGTGPGSSPSASTGTGPGASPGT | | |
| | SSTGSPGTPGSGTASSSPGSSTPSGATGSPGSSPSASTGTGPGSSPS | | |
| | ASTGTGPGASPGTSSTGSPGASPGTSSTGSPGSSTPSGATGSPGSS | | |
| | PSASTGTGPGASPGTSSTGSPGSSPSASTGTGPGTPGSGTASSSPG | | |
| | SSTPSGATGSPGSSTPSGATGSPGASPGTSSTGSP | | |
| AM875 | GTSTEPSEGSAPGSEPATSGSETPGSPAGSPTSTEEGSTSSTAESP | 1.5 | 764 |
| | GPGTSTPESGSASPGSTSESPSGTAPGSTSESPSGTAPGTSTPESGS | | |
| | ASPGTSTPESGSASPGSEPATSGSETPGTSESATPESGPGSPAGSP | | |
| | TSTEEGTSTEPSEGSAPGTSESATPESGPGTSTEPSEGSAPGTSTEP | | |
| | SEGSAPGSPAGSPTSTEEGTSTEPSEGSAPGTSTEPSEGSAPGTSE | | |
| | SATPESGPGTSESATPESGPGTSTEPSEGSAPGTSTEPSEGSAPGT | | |
| | SESATPESGPGTSTEPSEGSAPGSEPATSGSETPGSPAGSPTSTEE | | |
| | GSSTPSGATGSPGTPGSGTASSSPGSSTPSGATGSPGTSTEPSEGS | | |
| | APGTSTEPSEGSAPGSEPATSGSETPGSPAGSPTSTEEGSPAGSPT | | |
| | STEEGTSTEPSEGSAPGASASGAPSTGGTSESATPESGPGSPAGSP | | |
| | TSTEEGSPAGSPTSTEEGSTSSTAESPGPGSTSESPSGTAPGTSPSG | | |
| | ESSTAPGTPGSGTASSSPGSSTPSGATGSPGSSPSASTGTGPGSEP | | |
| | ATSGSETPGTSESATPESGPGSEPATSGSETPGSTSSTAESPGPGS | | |
| | TSSTAESPGPGTSPSGESSTAPGSEPATSGSETPGSEPATSGSETP | | |
| | GTSTEPSEGSAPGSTSSTAESPGPGTSTPESGSASPGSTSESPSGTA | | |
| | PGTSTEPSEGSAPGTSTEPSEGSAPGTSTEPSEGSAPGSSTPSGAT | | |
| | GSPGSSPSASTGTGPGASPGTSSTGSPGSEPATSGSETPGTSESAT | | |
| | PESGPGSPAGSPTSTEEGSSTPSGATGSPGSSPSASTGTGPGASPG | | |
| | TSSTGSPGTSESATPESGPGTSTEPSEGSAPGTSTEPSEGSAP | | |
| AM1296 | GTSTEPSEGSAPGSEPATSGSETPGSPAGSPTSTEEGSTSSTAESP | 1.6 | 765 |
| | GPGTSTPESGSASPGSTSESPSGTAPGSTSESPSGTAPGTSTPESGS | | |
| | ASPGTSTPESGSASPGSEPATSGSETPGTSESATPESGPGSPAGSP | | |
| | TSTEEGTSTEPSEGSAPGTSESATPESGPGTSTEPSEGSAPGTSTEP | | |
| | SEGSAPGSPAGSPTSTEEGTSTEPSEGSAPGTSTEPSEGSAPGTSE | | |
| | SATPESGPGTSESATPESGPGTSTEPSEGSAPGTSTEPSEGSAPGT | | |
| | SESATPESGPGTSTEPSEGSAPGSEPATSGSETPGSPAGSPTSTEE | | |
| | GSSTPSGATGSPGTPGSGTASSSPGSSTPSGATGSPGTSTEPSEGS | | |
| | APGTSTEPSEGSAPGSEPATSGSETPGSPAGSPTSTEEGSPAGSPT | | |
| | STEEGTSTEPSEGSAPGPEPTGPAPSGGSEPATSGSETPGTSESAT | | |
| | PESGPGSPAGSPTSTEEGTSESATPESGPGSPAGSPTSTEEGSPAG | | |
| | SPTSTEEGTSESATPESGPGSPAGSPTSTEEGSPAGSPTSTEEGSTS | | |
| | STAESPGPGSTSESPSGTAPGTSPSGESSTAPGSTSESPSGTAPGST | | |
| | SESPSGTAPGTSPSGESSTAPGTSTEPSEGSAPGTSESATPESGPG | | |
| | TSESATPESGPGSEPATSGSETPGTSESATPESGPGTSESATPESGP | | |
| | GTSTEPSEGSAPGTSESATPESGPGTSTEPSEGSAPGTSPSGESST | | |
| | APGTSPSGESSTAPGTSPSGESSTAPGTSTEPSEGSAPGSPAGSPT | | |
| | STEEGTSTEPSEGSAPGSSPSASTGTGPGSSTPSGATGSPGSSTPS | | |
| | GATGSPGSSTPSGATGSPGSSTPSGATGSPGASPGTSSTGSPGAS | | |
| | ASGAPSTGGTSPSGESSTAPGSTSSTAESPGPGTSPSGESSTAPGT | | |
| | SESATPESGPGTSTEPSEGSAPGTSTEPSEGSAPGSSPSASTGTGP | | |
| | GSSTPSGATGSPGASPGTSSTGSPGTSTPESGSASPGTSPSGESST | | |
| | APGTSPSGESSTAPGTSESATPESGPGSEPATSGSETPGTSTEPSE | | |
| | GSAPGSTSESPSGTAPGSTSESPSGTAPGTSTPESGSASPGSPAGS | | |
| | PTSTEEGTSESATPESGPGTSTEPSEGSAPGSPAGSPTSTEEGTSES | | |
| | ATPESGPGSEPATSGSETPGSSTPSGATGSPGASPGTSSTGSPGSS | | |
| | TPSGATGSPGSTSESPSGTAPGTSPSGESSTAPGSTSSTAESPGPG | | |
| | SSTPSGATGSPGASPGTSSTGSPGTPGSGTASSSPGSPAGSPTSTE | | |
| | EGSPAGSPTSTEEGTSTEPSEGSAP | | |
| AM923 | MAEPAGSPTSTEEGASPGTSSTGSPGSSTPSGATGSPGSSTPSGAT | 1.5 | 766 |
| | GSPGTSTEPSEGSAPGSEPATSGSETPGSPAGSPTSTEEGSTSSTA | | |
| | ESPGPGTSTPESGSASPGSTSESPSGTAPGSTSESPSGTAPGTSTPE | | |
| | SGSASPGTSTPESGSASPGSEPATSGSETPGTSESATPESGPGSPA | | |
| | GSPTSTEEGTSTEPSEGSAPGTSESATPESGPGTSTEPSEGSAPGT | | |
| | STEPSEGSAPGSPAGSPTSTEEGTSTEPSEGSAPGTSTEPSEGSAP | | |
| | GTSESATPESGPGTSESATPESGPGTSTEPSEGSAPGTSTEPSEGS | | |
| | APGTSESATPESGPGTSTEPSEGSAPGSEPATSGSETPGSPAGSPT | | |
| | STEEGSSTPSGATGSPGTPGSGTASSSPGSSTPSGATGSPGTSTEP | | |
| | SEGSAPGTSTEPSEGSAPGSEPATSGSETPGSPAGSPTSTEEGSPA | | |
| | GSPTSTEEGTSTEPSEGSAPGASASGAPSTGGTSESATPESGPGSP | | |
| | AGSPTSTEEGSPAGSPTSTEEGSTSSTAESPGPGSTSESPSGTAPG | | |
| | TSPSGESSTAPGTPGSGTASSSPGSSTPSGATGSPGSSPSASTGTG | | |
| | PGSEPATSGSETPGTSESATPESGPGSEPATSGSETPGSTSSTAESP | | |
| | GPGSTSSTAESPGPGTSPSGESSTAPGSEPATSGSETPGSEPATSG | | |
| | SETPGTSTEPSEGSAPGSTSSTAESPGPGTSTPESGSASPGSTSESP | | |
| | SGTAPGTSTEPSEGSAPGTSTEPSEGSAPGTSTEPSEGSAPGSSTP | | |
| | SGATGSPGSSPSASTGTGPGASPGTSSTGSPGSEPATSGSETPGTS | | |
| | ESATPESGPGSPAGSPTSTEEGSSTPSGATGSPGSSPSASTGTGPG | | |
| | ASPGTSSTGSPGTSESATPESGPGTSTEPSEGSAPGTSTEPSEGSA | | |
| | P | | |
| AE912 | MAEPAGSPTSTEEGTPGSGTASSSPGSSTPSGATGSPGASPGTSST | 1.7 | 767 |
| | GSPGSPAGSPTSTEEGTSESATPESGPGTSTEPSEGSAPGSPAGSP | | |
| | TSTEEGTSTEPSEGSAPGTSTEPSEGSAPGTSESATPESGPGSEPA | | |
| | TSGSETPGSEPATSGSETPGSPAGSPTSTEEGTSESATPESGPGTS | | |
| | TEPSEGSAPGTSTEPSEGSAPGSPAGSPTSTEEGTSTEPSEGSAPG | | |
| | TSTEPSEGSAPGTSESATPESGPGTSTEPSEGSAPGTSESATPESGP | | |
| | GSEPATSGSETPGTSTEPSEGSAPGTSTEPSEGSAPGTSESATPES | | |
| | GPGTSESATPESGPGSPAGSPTSTEEGTSESATPESGPGSEPATSG | | |
| | SETPGTSESATPESGPGTSTEPSEGSAPGTSTEPSEGSAPGTSTEPS | | |
| | EGSAPGTSTEPSEGSAPGTSTEPSEGSAPGTSTEPSEGSAPGSPAG | | |
| | SPTSTEEGTSTEPSEGSAPGTSESATPESGPGSEPATSGSETPGTSE | | |
| | SATPESGPGSEPATSGSETPGTSESATPESGPGTSTEPSEGSAPGT | | |
| | SESATPESGPGSPAGSPTSTEEGSPAGSPTSTEEGSPAGSPTSTEE | | |
| | GTSESATPESGPGTSTEPSEGSAPGTSESATPESGPGSEPATSGSE | | |
| | TPGTSESATPESGPGSEPATSGSETPGTSESATPESGPGTSTEPSE | | |
| | GSAPGSPAGSPTSTEEGTSESATPESGPGSEPATSGSETPGTSESA | | |
| | TPESGPGSPAGSPTSTEEGSPAGSPTSTEEGTSTEPSEGSAPGTSES | | |
| | ATPESGPGTSESATPESGPGTSESATPESGPGSEPATSGSETPGSE | | |
| | PATSGSETPGSPAGSPTSTEEGTSTEPSEGSAPGTSTEPSEGSAPG | | |
| | SEPATSGSETPGTSESATPESGPGTSTEPSEGSAP | | |

### Example 33

### Selective Cytotoxicity of 3xFA(γ),3xMMAE-XTEN on KB Cells

[0550] The ability to selectively target and kill cells bearing folate receptors was evaluated. Test articles of free MMAE, a non-targeting 3xMMAE-XTEN conjugate (XTEN linked to toxin) and the folate receptor-targeted 3xFA(γ),3xMMAE-XTEN conjugate were evaluated in a CellTiter-Glo anti-proliferation assay using the folate receptor-positive KB cell line. As culture media contain high folic acid content, KB cells were grown in folic acid-free media containing 10% heat-inactivated fetal calf serum at 37° C., 5% CO2 for at least 7 days prior to the commencement of the cell viability experiment, This medium was also utilized for the execution of the experiment. In brief, KB cells were plated at 10,000 cells per well onto a 96-well microtiter assay plate. KB cells were allowed to adhere to the plate by an overnight incubation at 37° C., 5% CO2. The spent media was then removed and wells designated to contain folic acid competitor received assay medium containing folic acid, while wells not designated to have folic acid competitor received assay medium only. The plate was incubated for 30 min at 37° C., 5% CO2 before the assay media was aspirated and plate washed with assay media. Free MMAE, 3xMMAE-XTEN and 3xFA(γ),3xMMAE-XTEN in the presence or absence of folic acid competitor was then added at an appropriate range of doses. The plate was then further incubated for 2-4 h at 37° C., 5% CO2. Media was then removed, the plate washed and fresh media introduced and the plate was allowed to incubate for an additional 48-72 h. After the appropriate incubation period, CellTiter-Glo reagent was added and the plate was read on a luminometer. The IC50 of each test article was determined using a 4 parameter logistic curve fit using GraphPad Prism.

[0551] Results: Free MMAE drug moiety showed highly potent killing of KB cells, with an IC50 of 0.8 nM, while 3 copies of MMAE conjugated to non-targeting XTEN resulted in at least a 3 log reduction in cell killing (IC50>1,000 nM). Significantly, the addition of 3 copies of folate targeting domains to the 3xMMAE-XTEN conjugate restored the cell killing, with an IC 50 of 4.2 nM; a level of activity close to that observed for free MMAE. Of equal importance, the introduction of folic acid as a competitor to the targeted conjugate impaired the observed cell killing activity of 3xFA(γ),3xMMAE-XTEN on the KB cell line. This reduction from potent cell killing of the folate-XTEN drug conjugate (from 4.2 nM to >1,000 nM) supports the conclusion that the detected cell toxicity was, under the experimental conditions, facilitated by use of the folate as the targeting mechanism for the drug conjugate against the KB cell line.

### Example 34

### In Vitro Cell-Based Evaluation of XTEN1-PCM-TM1-XTEN2

[0552] An experiment was performed to test the ability of an XTEN-conjugate composition comprising components including a folate targeting moiety (TM), a peptidyl cleavage sequence (PCM), and a cytotoxic drug, all components being linked to an XTEN in a designed configuration, in order to exhibit a differential degree in an in vitro assay of cytotoxicity on a mammalian cell in the presence or absence of a protease capable of cleaving the composition and releasing the components. In the experiment, the test XTEN-conjugate composition was conjugate #2, consisting of XTEN864 as XTEN1; PLGLAG (SEQ ID NO: 4) as the sequence of the PCM, folate as the TM, MMAF as the cytotoxic drug which was configured as XTEN432-3xMMAF using a second XTEN (XTEN2). As corresponding controls, conjugates not containing XTEN1 (conjugate #385; PLGLAG-1xfolate-XTEN432-3xMMAF (“PLGLAG” disclosed as SEQ ID NO: 4)) or XTEN1-PCM (conjugate #386; 1xfolate-XTEN432-3xMMAF) were included in the analysis. All 3 conjugates were tested in a CellTiter-Glo anti-proliferation assay utilizing folate receptor-positive human KB cells.

[0553] Briefly, KB cells were grown in folate-free RPMI plus 10% heat-inactivated fetal calf serum and were plated at 1×10⁴ into each well of a 96-well microtiter plate. The KB cells were allowed to attach to the plate by an overnight incubation at 37° C., 5% CO2. Conjugate #2, #386 and #385 with and without MMP-9 treatment were introduced in a dose range in duplicates and the plate was incubated for 3 days at 37° C., 5% CO2. After the appropriate incubation period, CellTiter-Glo reagent was added to each well, mixed for 2 minutes on an orbital shaker. The plate was then centrifuged at 90 x g and incubated at room temperature for an additional 10 minutes to stabilize the luminescent signal Luminescence signals were then read on a luminometer and an IC₅₀s (half maximal inhibitory concentration) was calculated with GraphPad Prism software.

[0554] Results. The results, shown in Table 37, demonstrated that conjugate #386 showed potent cytotoxic activity with an IC₅₀ of 0.54 nM. As conjugate #386 does not contain the PCM, treatment with MMP-9 did not affect its in vitro activity (IC₅₀ of 0.73 nM). No change in cytotoxic activity was observed between MMP-9-treated and MMP-9-untreated conjugate #385; a construct containing PCM but without XTEN1 (XTEN864) for a shielding effect (IC₅₀ of 0.94 nM and 0.75 nM respectively). Significantly, while MMP-9 treated conjugate #2 exhibited in vitro cytotoxic activities equivalent to that of conjugate #386; conjugate #2 not treated with MMP-9 was 8-fold less active. The data suggest that under the experimental conditions, the XTEN imparts a shielding effect against proteolysis by MMP-9, and that the construct with a PCM capable of being cleaved by a protease is capable of causing an enhanced degree of cytotoxicity when the protease is present.

TABLE 37
Cytotoxicity of MMP-9 treated and untreated conjugates

| Conjugate # | MMP-9 treated | IC₅₀ (nM) |
|---|---|---|
| 386 | No | 0.54 |
| 386 | Yes | 0.73 |
| 385 | No | 0.75 |
| 385 | Yes | 0.94 |
| 2 | No | 6.88 |
| 2 | Yes | 0.82 |

### Example 35

### In Vitro Cytotoxicity and Specificity Evaluation of FA-XTEN432-3xMMAF, XTEN432-3xMMAF, FA-XTEN864-3xMMAF and XTEN864-3xMMAF Conjugates

[0555] The cytotoxic activity of four conjugate constructs; two having a folic acid (FA) targeting moiety and two without, with all four having three molecules of MMAF conjugated to XTEN_432 or XTEN_864, were compared for the ability to effect cytotoxicity in an in vitro assay. FA-XTEN432-3xMMAF, XTEN432-3xMMAF, FA-XTEN864-3xMMAF and XTEN864-3xMMAF were evaluated in a CellTiter-Glo cell viability assay using the folate receptor positive KB cell line in the presence and absence of free folic acid (FA) as competitor (FIG. 58 and FIG. 59). As cell culture media contain high folic acid content, the KB cells were grown and the assay performed in folic acid-free RPMI plus 10% heat-inactivated fetal calf serum (FCS). Briefly, KB cells were plated at 1×104 into each well of a 96-well microtiter plate and allowed to attach to the plate by an overnight incubation at 37° C., 5% CO2. The FA-XTEN432-3xMMAF and FA-XTEN864-3xMMAF conjugates, with and without folic acid treatment, as well as XTEN432-3xMMAF and XTEN864-3xMMAF conjugates were all introduced into the plate in a 4 fold serial dilution dose range of 600 to 0.002 nM for the XTEN432 series or 100 to 0.02 nM for the XTEN864 series (in duplicate) and plate was incubated for 3 days at 37° C., 5% CO2. After the appropriate incubation period, CellTiter-Glo reagent was added to each well, and the plate was mixed for 2 min on an orbital shaker. The plate was then centrifuged at 90×g and incubated at room temperature for an additional 10 min to stabilize the luminescent signal. Luminescence signals were then read on a luminometer and an IC50s (half maximal inhibitory concentration) was calculated with GraphPad Prism software.

[0556] Results: As shown in FIG. 58, dosed at equimolar concentration, FA-XTEN432-3xMMAF, with the folate targeting moiety, showed highly potent killing with IC₅₀ of 0.6 nM while the XTEN432-3xMMAF conjugate construct bearing no targeting moiety was drastically less effective by at least 3 logs, yielding minimal cytotoxicity (IC₅₀>600 nM). Importantly, the addition of folic acid as competitor impaired the observed cell killing activity of FA-XTEN432-3xMMAF on KB cells (IC₅₀>600 nM), demonstrating the specificity of the folate receptor-mediated cytotoxicity (FIG. 58). Similar results were obtained with the XTEN864-containing conjugates. FA-XTEN864-3xMMAF exhibited potent cytotoxicity (IC₅₀ of 1.2 nM) that was inhibited by folic acid (IC₅₀>100 nM), while the corresponding non-targeted XTEN864-3xMMAF conjugate did not possess any significant in vitro cytotoxic activity (IC₅₀>100 nM) (FIG. 59).

[0557] Conclusions:The data suggest that under the experimental conditions, the folate moiety imparts a folate receptor-mediated targeting effect that enhanced the cytotoxic activity of the XTEN-drug conjugates.

### Example 36

### In Vivo Efficacy and Safety Evaluation of FA-XTEN432-3xMMAF, XTEN432-3xMMAF, FA-XTEN864-3xMMAF and XTEN864-3xMMAF Conjugates

[0558] Folate-XTEN-drug conjugates are intended for targeted delivery of the toxin component to folate receptor positive tumor cells. Table 18 describes examples of tumor lines that can be used in a xenograft study. As an example, the folate receptor positive human KB cervical cell line was used to determine the in vivo efficacy and safety of the folate-XTEN-drug constructs. Prior to beginning the in vivo efficacy and safety study, two studies in female nu/nu mice were carried out to determine: (1) pharmacokinetics of targeted FA-XTEN432-3xMMAF and the corresponding non-targeting XTEN432-3xMMAF molecules; and (2) the maximum tolerated dose (MTD) of FA-XTEN432-3xMMAF conjugate. Results from both studies contributed to the final design of the efficacy & safety study for appropriate dose level and dosing frequency to be used. As normal rodent chow contains a high concentration of folic acid (6 mg/kg chow), all mice used in these studies were maintained on a folate deficient diet for 2 weeks prior to study initiation and for the duration of the study to reduce serum folate concentration to level representing human physiological range.

[0559] 1) Pharmacokinetics of FA-XTEN432-3xMMAF and XTEN432-3xMMAF in Female nu/nu Mice on a Low-Folate Diet

[0560] Six female nu/nu mice were intravenously injected with a single dose of 2 mg/kg of the FA-XTEN432-3xMMAF, and six female nu/nu mice were intravenously injected with a single dose of 2 mg/kg of XTEN432-3xMMAF. Blood was drawn and processed into plasma at the denoted time points of pre-dose, 10 min, 3 h, 8 h, 1 d, 2 d and 3 d post-dose for both groups. The amount of FA-XTEN432-3xMMAF and XTEN432-3xMMAF present in the various plasma samples were quantitated using a sandwich ELISA with an anti-XTEN antibody. The elimination half-life of FA-XTEN432-3xMMAF was estimated to be 9.1 h and XTEN432-3xMMAF to be 13.7 h (FIG. 60) using PK Solutions v2 software.

[0561] 2) MTD of FA-XTEN432-3xMMAF in Female nu/nu Mice on a Low-Folate Diet

[0562] The single dose MTD experiment was carried out with 5 female nu/nu mice per group, evaluating the IV administration of FA-XTEN432-3xMMAF at 10, 20, 50 and 100 mg/kg (molar equivalent of 0.5, 1, 2.5 and 5 mg/kg MMAF respectively). As a measure of gross toxicity, the body weight of each animal was monitored daily for the first week and then twice per week until the study endpoint of 15 days. In addition, any death and clinical signs of piloerection, hunched behavior patterns, respiratory pattern, tremors, convulsions, prostration, self-mutilation and dehydration were recorded. The XTEN-drug conjugate was considered to have acceptable toxicity when the group mean body weight loss was <20% during the study and not more than 10% occurrence in treatment-related death among treated animals The MTD was set as the highest dose with acceptable toxicity. All regimens of FA-XTEN432-3xMMAF were acceptably tolerated with minimal body weight loss of 1 to 6% (FIG. 61); and exhibited no clinical signs consistent with drug-related side effects. Hence, the MTD of FA-XTEN432-3xMMAF was determined to be >100 mg/kg.

[0563] 3) Efficacy and Safety Analysis of Folate-XTEN-Drug Conjugates

[0564] Based on the PK and MTD results obtained, above, the following study design was adopted for the efficacy and safety assessment of folate-XTEN-drug conjugates. To reduce folate content, the folate receptor positive KB cells to be implanted into nu/nu mice were first grown in folic acid-free cell culture media containing 10% heat-inactivated fetal calf serum with no antibiotics. Similarly, to reduce serum folate concentration, mice used in the xenograft studies were maintained on a folate deficient diet for 2 weeks prior to tumor implantation and for the duration of the study. Briefly, 3×10⁶ KB cells were injected subcutaneously in the flank of nu/nu mice and allowed to form tumors, the size of which was measured with calipers and the volume calculated as 0.5×L×W², where L=measurement of longest axis in millimeters and W=measurement of axis perpendicular to L in millimeters. Mice bearing KB tumor sizes of 75-162 mm³ were randomized into 7 groups of 8 animals per group and administered intravenously with the respective XTEN-drug conjugates, 3×per week for 1 week according to Table 38.

TABLE 38
Experimental dose schedule

| | | | | | Total |
|---|---|---|---|---|---|
| | | | | Dose | MMAF |
| | | | Dose/ | per | equivalent |
| | | | injection | week | per week |
| Group | N | Agent | (mg/kg) | (mg/kg) | (mg/kg) |
| 1 | 8 | PBS | 0 | 0 | 0 |
| 2 | 8 | FA-XTEN432-3xMMAF | 6.7 | 20 | 1 |
| 3 | 8 | FA-XTEN432-3xMMAF | 26.4 | 79 | 4 |
| 4 | 8 | XTEN432-3xMMAF | 26.4 | 77 | 4 |
| 5 | 8 | FA-XTEN864-3xMMAF | 12.7 | 38 | 1 |
| 6 | 8 | FA-XTEN864-3xMMAF | 50 | 151 | 4 |
| 7 | 8 | XTEN864-3xMMAF | 50 | 149 | 4 |

[0565] Cessation or regression of tumor growth was determined through caliper measurement twice per week until the study endpoint. The endpoint of the study was defined as tumor volume of 2,000 mm³ or 60 days, whichever comes first. Animals were scored as being partial regressions (PR) when tumor volume was determined to be <50% of its day 1 volume for three consecutive measurements during the course of the study, and >13.5 mm³ for one or more of these measurements. Animals were considered to be complete regression (CR) when the tumor volume was <13.5 mm³ for three consecutive measurements during the study. Any animal with a complete regression at the end of the study was further classified as tumor free survivor (TFS). To assess gross toxicity, animals were monitored individually for body weight on a daily basis for the first week and then twice per week till study endpoint. Any clinical signs of distress, deaths or adverse events were also recorded.

[0566] Results: As shown in FIGS. 62 and 63, FA-XTEN432-3xMMAF administered at 79 mg/kg was found to be efficacious and well-tolerated yielding 2 PR, 6CR and 5TFS with no visible weight loss. In contrast, the XTEN432-3xMMAF injected group exhibited aggressive tumor progression with no responders (FIG. 62). At 38 mg/kg, FA-XTEN864-3xMMAF yielded 1 PR with no significant loss in body weight (FIGS. 64 and 65). However, at 151 mg/kg, the FA-XTEN864-3xMMAF conjugate was highly efficacious with 8 TFS (FIG. 64) and acceptable toxicity with a maximum body weight loss of 12% by day 11 (FIG. 65). The non-targeted XTEN864-3xMMAF also caused tumor regression to some extent with 2 PR, 2 CR and 1 TFS (FIG. 64). This group, however, had the highest toxicity among all conjugates tested with a maximum loss in body weight of 20% by day 11 (FIG. 65). All animals in FA-XTEN864-3xMMAF and XTEN864-3xMMAF group regained body weight and recovered well over time (FIG. 65).

[0567] Conclusions: The data strongly suggest that within the context of the KB xenograft model, presence or absence of the folate targeting moiety, as well as XTEN length, have a significant impact on the performance of XTEN-drug conjugates. Drug conjugates bearing targeting moiety are more efficacious than their non-targeting counterparts; and XTEN864-containing constructs were more effective than XTEN432-containing constructs.

### Example 37

### Pharmacokinetics and Bio-Distribution Analysis of Anti-HER2scFv-XTEN432, XTEN432, anti-HER2scFv-XTEN864 and XTEN864 in Female Athymic Nude Mice Bearing Human BT474 Breast Carcinoma

[0568] The pharmacokinetic and biodistribution properties of targeted XTEN and separate XTEN molecules were analyzed in female athymic nude mice bearing human BT474 breast carcinoma. To enable the concurrent evaluation of anti-HER2scFv-XTEN432, XTEN432, anti-HER2scFv-XTEN864 and XTEN864 in the same mouse and to minimize mouse-to-mouse variation, anti-HER2scFv-XTEN432, XTEN432, anti-HER2scFv-XTEN864 and XTEN864 were each labeled with an orthogonal rare lanthanide earth ion via the DOTA (1,4,7,10-tetraazacyclododecane-1,4,7,10-tetraacetic acid) chelator to yield the respective molecules: anti-HER2scFv-XTEN432-DOTA-holmium (Ho), XTEN432-DOTA-Thulium (Tm), anti-HER2scFv-XTEN864-DOTA-Terbium (Tb) and XTEN864-DOTA_Lutetium (Lu). All 4 labeled proteins were then mixed at equimolar concentration for administration at 2 targeted dose levels of 26 nmol/kg and 460 nmol/kg. The 26 nmol/kg dose was selected so as not to cause HER2 receptor saturation and to avoid competition between anti-HER2scFv-XTEN432-DOTA-Ho and anti-HER2scFv-XTEN864-DOTA-Tb for available HER2 binding sites on the BT474 tumor cells. The 460 nmol/kg dose on the other hand was likely to cause HER2 receptor saturation and competition between both HER2 targeting XTENylated proteins.

[0569] Eighteen female athymic nude mice were injected subcutaneously in the flank with 1×10⁷ BT474 (ATCC cat #HTB-20) human breast cancer cells. The grafted tumors were monitored as their volumes approached the target range of 250-350 mm³, the size of which was measured with calipers and the volume calculated as 0.5×(L×W²) where L=length and W=width, in millimeters (mm) of the tumor. A month after cells implant, designated as Day 0, 12 out of the 18 mice bearing appropriate BT474 tumor size were sorted into 4 groups of 3 animals per group. At Day 0, individual tumor volume of the 12 mice ranged from 152 to 381 mm³ and group mean tumor volumes were 256 to 257 mm³ Treatment was initiated on Day 0 with the intravenous administration of 26 nmol/kg of anti-HER2scFv-XTEN432-DOTA-Ho, XTEN432-DOTA-Tm, anti-HER2scFv-XTEN864-DOTA-Tb and XTEN864-DOTA-Lu mixture to 6 mice with established BT474 xenograft. The other 6 mice were injected with 460 nmol/kg of the protein mixture.

[0570] For pharmacokinetics analysis, blood were drawn into lithium heparinized tubes and processed into plasma at defined time points of pre-dose, 3 h, 8 h, 1 d, 2 d and 3 d post-dose for both dose groups. The amount of anti-HER2scFv-XTEN432-DOTA-Ho, XTEN432-DOTA-Tm, anti-HER2scFv-XTEN864-DOTA-Tb and XTEN864-DOTA-Lu present in the various plasma samples were quantitated for the respective rare-earth metal using Inductively Coupled Plasma Mass Spectrometry (ICP-MS). The elimination half-life for each labeled protein administered at 26 nmol/kg and 460 nmol/kg was determined using GraphPad Prism (San Diego).

[0571] The T_{1/2} for anti-HER2scFv-XTEN432-DOTA-Ho was estimated to be 9.6 to 12.5 h; 9.2 to 13.0 h for XTEN432-DOTA-Tm; 23.1 to 31.2 h for anti-HER2scFv-XTEN864-DOTA-Tb and 22.2 to 29.2 h for XTEN864-DOTA-Lu (FIGS. 67 and 68). As expected, XTEN length has a critical influence on half-life; with the longer 864 amino acid XTEN providing a T_{1/2} of 22-31 h versus the shorter 432 amino acid XTEN with a T_{1/2} of 9-13 h. The presence of the anti-HER2 targeting scFv, on the other hand, seemed to have little effect on plasma exposure.

[0572] For tissue bio-distribution analysis, 3 mice from each dose level were sacrificed at 24 h and another 3 mice at 72 h. At the respective terminal endpoint, tumor, heart, kidneys, liver, lungs, spleen, pancreas and brain were harvested, rinsed in PBS, blotted dry, weigh and snap frozen. The amount of anti-HER2scFv-XTEN432-DOTA-Ho, XTEN432-DOTA-Tm, anti-HER2scFv-XTEN864-DOTA-Tb and XTEN864-DOTA-Lu present in the various tissues were quantitated by each rare-earth metal using ICP-MS and data expressed as percent injected dose per g tissue (% ID/g).

[0573] At 26 nmol/kg, a concentration decay of both anti-HER2scFv-XTEN432-DOTA-Ho and XTEN432-DOTA-Tm in plasma and healthy tissues was observed; with the exception of considerable accumulation of anti-HER2scFv-XTEN432-DOTA-Ho in the liver and tumor (FIGS. 69A and 69B) (It was noteworthy that the brain had minimal detectable level of anti-HER2scFv-XTEN432-DOTA-Ho and XTEN432-DOTA-Tm, suggesting that XTENylated proteins did not pass through the blood brain barrier and localized in the brain.). It is the desired outcome that HER2 targeting resulted in effective (25±15% ID/g) and sustained accumulation in the tumor as compared to the non-targeted construct (3±1% ID/g). While it is currently unknown why anti-HER2scFv-XTEN432-DOTA-Ho accumulated in the kidney, a plausible explanation would be that anti-HER2scFv-XTEN432-DOTA-Ho was cleared via the kidney and thus subjected to tubular reabsorption due to the presence of the anti-HER2 scFv moiety. This was supported by the observation that the non-HER2 targeted XTEN432-DOTA-Tm when cleared was not reabsorbed or accumulated in the kidney. The same bio-distribution pattern was observed at the 460 nmol/kg dose level, albeit at a lower quantitative level due possibly to some competition for the HER2 binding sites from the anti-HER2scFv-XTEN864-DOTA-Tb construct in the injected mixture (FIGS. 70A and 70B)

[0574] At 26 nmol/kg, a concentration decay of anti-HER2scFv-XTEN864-DOTA-Tb and XTEN864-DOTA-Lu in plasma and healthy tissues were observed, with the exception of significant accumulation of anti-HER2scFv-XTEN864-DOTA-Tb and to some extend XTEN864-DOTA-Lu in the tumor (FIGS. 71A and 71B). It is the desired expectation that anti-HER2scFv-XTEN864-DOTA-Tb was demonstrated not only to accumulate strongly in the tumor (35±20% ID/g) but also preferentially better than the non-targeted XTEN864-DOTA-Lu (11±4% ID/g). It is believed that the XTEN864-DOTA-Lu accumulated in the tumor due to the enhanced permeability and retention effect because of its large size. In contrast to the anti-HER2scFv-XTEN432-DOTA-Ho conjugate, no kidney accumulation of anti-HER2scFv-XTEN864-DOTA-Tb was observed. This can be accounted for by anti-HER2scFv-XTEN864-DOTA-Tb exceeding the size for kidney clearance. The same bio-distribution profiles for anti-HER2scFv-XTEN864-DOTA-Tb and XTEN864-DOTA-Lu were observed at 460 nmol/kg dose, not with standing at a lower quantitative level for the anti-HER2scFv-XTEN864-DOTA-Tb construct due possibly to some competition for the HER2 binding sites from the anti-HER2scFv-XTEN432-DOTA-Ho construct (FIGS. 72A and 72B). It is currently unknown why there was some apparent accumulation of both anti-HER2scFv-XTEN864-DOTA-Tb and XTEN864-DOTA-Lu in the spleen at 72 h.

[0575] Further, it is also in line with expectation that the smaller anti-HER2scFv-XTEN432-DOTA-Ho accumulated faster in the tumor than the larger anti-HER2scFv-XTEN864-DOTA-Tb at 24 h. However, over time at 72 h, due to its longer circulating half-life, considerably more anti-HER2scFv-XTEN864-DOTA-Tb was found to accumulate in the tumor than anti-HER2scFv-XTEN432-DOTA-Ho (FIG. 73).

### Example 38

### Efficacy and Safety Analysis of Anti-HER2scFv-3xMMAE-XTEN720 in Female Athymic Nude Mice Bearing Human BT474 Breast Cancer Cells

[0576] The following study design was utilized for the efficacy and safety assessment of anti-HER2scFv-3xMMAE-XTEN720 drug conjugate in the BT474 xenograft model in athymic nude mice. Briefly, 1×10⁷ BT474 cells were injected subcutaneously in the flank of female athymic nude mice and allowed to form tumors, the size of which was measured with calipers and the volume calculated as 0.5×(L×W²), where L=length and W=width, in millimeters (mm) of the tumor. Twenty-nine days after cells implant, designated as Day 0, mice bearing targeted tumor size of 100-200 mm³ were sorted into 4 groups of 8 animals per group. At Day 0, individual tumor volume of the mice enrolled in the study ranged from 107 to 278 mm³ and group mean tumor volumes were 183 to 185 mm³. Treatment was initiated on Day 0 with the intravenous administration of PBS vehicle control, 30, 100 and 300 nmol/kg of the anti-HER2scFv-3xMMAE-XTEN720 drug conjugate.

[0577] Cessation or regression of tumor growth was determined through caliper measurement three times per week till study endpoint. The endpoint of the study was defined as tumor volume of 800 mm³ or 30 days, whichever comes first. Percent tumor growth inhibition (% TGI) was calculated for each treatment group with the following formula: ((Mean tumor volume of vehicle control−Mean tumor volume of HER2 conjugate)/mean tumor volume of vehicle control)×100. Treatment group with % TGI 60% is considered therapeutically active. As an assessment of gross toxicity, animals were monitored individually for body weight three times per week till study endpoint. Any clinical signs of distress, deaths or adverse events were also noted.

[0578] As expected, there was no tumor inhibition in BT474 tumor bearing mice administered with PBS vehicle, yielding a % TGI of zero. In contrast and as shown in FIG. 74, anti-HER2scFv-3xMMAE-XTEN720 drug conjugate was found to be efficacious at all 3 doses evaluated and was well tolerated with no visible weight loss (FIG. 75). At Day 30, the % TGI for anti-HER2scFv-3xMMAE-XTEN720 dosed at 30 nmol/kg was 90%; at 100 nmol/kg, 91% and at 300 nmol/kg, 97%; suggesting that 30 nmol/kg of drug conjugate has almost equivalent efficacy as 300 nmol/kg.

[0579] The above data strongly suggest that within the context of the BT474 xenograft model, anti-HER2scFv-3xMMAE-XTEN720 is highly efficacious and safe, with efficacy achievable at doses as low as 30 nmol/kg of drug conjugate.

### Example 39

### Pharmacokinetic Determination of PCM Containing XTEN

[0580] The pharmacokinetic properties of XTEN bearing different PCM sequences were analyzed in female athymic nude mice. PCM with RS1 (MMP-2/9), RS2 (MMP-7), RS3 (uPA) and RS4 (MMP-14) composition was first evaluated; followed by PCM with tandem protease release sites BSRS1, BSRS2 and BSRS3 in study 2. To enable the concurrent analysis of the various RS & BSRS configurations on the circulating half-life of XTEN in the same mouse as well as to minimize mouse-to-mouse variation, the respective XTEN-RS and XTEN-BSRS were each labeled with an orthogonal rare lanthanide earth ion via the DOTA (1,4,7,10-tetraazacyclododecane-1,4,7,10-tetraacetic acid) chelator to yield the corresponding molecules in support of the two studies.

[0581] In study 1, XTEN864-RS1-DOTA-holmium (Ho), XTEN864-RS2-DOTA-Terbium (Tb), XTEN864-RS3-DOTA-Thulium (Tm), XTEN864-RS4-DOTA-Europium (Eu) and control XTEN864-DOTA-Lutetium (Lu) were analyzed. Six female nu/nu mice were intravenously injected with a mixture containing 2 mg/kg each of XTEN864-RS1-DOTA-Ho, XTEN864-RS2-DOTA-Tb, XTEN864-RS3-DOTA-Tm, XTEN864-RS4-DOTA-Eu and XTEN864-DOTA-Lu. Blood was drawn and processed into plasma at the denoted time points of pre-dose, 3 h, 8 h, 1 d, 2 d, 3 d and 4 d post-dose between both groups. The amount of XTEN864-RS1-DOTA-Ho, XTEN864-RS2-DOTA-Tb, XTEN864-RS3-DOTA-Tm, XTEN864-RS4-DOTA-Eu and XTEN864-DOTA-Lu present in the various plasma samples were quantitated for the respective rare-earth metal using Inductively Coupled Plasma Mass Spectrometry (ICP-MS). The elimination half-life for each labeled protein administered at 2 mg/kg was determined using GraphPad Prism (San Diego).

[0582] The T_{1/2} for XTEN864-RS1-DOTA-Ho was estimated to be 24.7 h, XTEN864-RS2-DOTA-Tb 25.3 h, XTEN864-RS3-DOTA-Tm 26.0 h, XTEN864-RS4-DOTA-Eu 26.7 h and XTEN864-DOTA-Lu 25.0 h (FIG.76). Results indicated that the presence of RS1, RS2, RS3 and RS4 composition on XTEN did not alter the T_{1/2} of the XTEN polymer.

[0583] In study 2, XTEN containing different tandem protease release sites were evaluated with XTEN864-BSRS1-DOTA-Tb, XTEN864-BSRS2-DOTA-Ho, XTEN864-BSRS3-DOTA-Tm, XTEN864-DOTA-Lu and XTEN144-DOTA-Eu; with XTEN864-DOTA-Lu serving as the non-B SRS containing XTEN and XTEN144-DOTA-Eu representing the cleaved shorten moiety. All 5 metal-labeled proteins were mixed at 2 mg/kg concentration and the resultant mixture intravenous administered into six female nu/nu mice. For pharmacokinetics analysis, blood were drawn into lithium heparinized tubes and processed into plasma at defined time points of pre-dose, 3 h, 8 h, 1 d, 2 d, 3 d, 4 d, 5 d, 6 d and 7 d post-dose among the six mice. The amount of XTEN864-BSRS1-DOTA-Tb, XTEN864-BSRS2-DOTA-Ho, XTEN864-BSRS3-DOTA-Tm, XTEN864-DOTA-Lu and XTEN144-DOTA-Eu present in the various plasma samples were quantitated for the respective rare-earth metal using ICP-MS. The elimination half-life for each labeled protein administered at 2 mg/kg was determined using GraphPad Prism (San Diego).

[0584] The T_{1/2} for XTEN864-BSRS1-DOTA-Tb was estimated to be 32.5 h; 32.6 h for XTEN864-BSRS2-DOTA-Ho; 32.5 h for XTEN864-BSRS3-DOTA-Tm and 30.6 h for XTEN864-DOTA-Lu (FIG. 77). In line with results observed in study 1, data in study 2 indicated that protease sites configured in tandem as represented by BSRS1, BSRS2 or BSRS-3 on XTEN also did not alter the T_{1/2} of the XTEN polymer. However, once cleaved, the molecule as exemplified by XTEN144-DOTA-Eu was rapidly cleared with an extremely short half-life of about 1.8 h.

### Example 40

### Binding Affinity of Protease-Treated and Untreated Anti-EpCAMscFv x Anti-CD3scFv-BSRS1-XTEN864 Bispecific Molecule

[0585] The PCM containing bispecific anti-EpCAMscFv x anti-CD3scFv-BSRS1-XTEN864 construct was used to evaluate the impact of protease treatment on binding affinity for the EpCAM ligand. Briefly, the recombinant anti-EpCAMscFv x anti-CD3scFv-BSRS1-XTEN864 molecule was treated or left untreated with MMP-9 for 2 h at 37° C. and analyzed in a dose range on an EpCAM/protein-L sandwich ELISA as follows: recombinant human EpCAM was coated onto a 96-well microtiter plate by an overnight incubation at 4° C. The wells were then blocked, washed and a dose range of protease treated anti-EpCAMscFv x anti-CD3scFv and untreated anti-EpCAMscFv x anti-CD3scFv-BSRS1-XTEN864 protein was added to the appropriate wells. After an h incubation to allow optimal capture of the protease-treated anti-EpCAMscFv x anti-CD3scFv and protease-untreated anti-EpCAMscFv x anti-CD3scFv-BSRS1-XTEN864 proteins by the coated EpCAM ligand, plate was washed again and peroxidase-conjugated protein L added. After an appropriate incubation period that allowed protein-L to bind to the kappa light of the scFvs, a final wash step was performed and tetramethylbenzidine (TMB) substrate added. TMB is a chromogenic substrate of peroxidase. Once desired color intensity was reached, 0.2 N sulfuric acid was introduced to stop the reaction and absorbance (OD) was measured at 450 nm using a spectrophotometer. The intensity of the color produced (i.e. OD) was plotted against the concentration of anti-EpCAMscFv x anti-CD3scFv and anti-EpCAMscFv x anti-CD3scFv-BSRS1-XTEN864 proteins. The concentration of analyte that gives half-maximal response (EC₅₀) was derived from the 4-parameter logistic regression equation.

[0586] As shown in FIG. 78, the protease-treated anti-EpCAMscFv X anti-CD3scFv bispecific molecule has a stronger binding activity (EC₅₀ 106 nM) for the EpCAM ligand compared to the protease-untreated intact bispecific molecule (EC₅₀ 284 nM). Data suggest that the presence of XTEN864 hindered the binding of the anti-EpCAMscFv moiety for its ligand by at least 2.7 fold.

### Example 41

### In Vitro Selectivity Evaluation of Folate-XTEN Drug Conjugate

[0587] The ability of folate-XTEN drug conjugates to selectively target and kill cells bearing folate receptors was evaluated in vitro in a CellTiter-Glo anti-proliferation assay against a panel of folate receptor positive and negative cell lines selected from Table 39 and using FA-XTEN432-3xMMAF as a representative folate targeted XTEN drug conjugate.

TABLE 39
Folate receptor positive and negative cell lines

| Cell line | Tissue | Folate receptor status |
|---|---|---|
| KB | Nasopharyngeal | Positive |
| IGROV | Ovarian | Positive |
| SK-OV-3 | Ovarian | Positive |
| JEG-3 | Placenta | Positive |
| HeLa | Cervical | Positive |
| LoVo | Colorectal | Positive |
| SW620 | Colorectal | Positive |
| MDA-MB-231 | Breast | Positive |
| A549 | Lung | Negative |
| A375 | Multiple melanoma | Negative |
| LS-174T | Colorectal | Negative |
| SK-BR-3 | Breast | Negative |

[0588] In brief, selectivity evaluation of folate-XTEN432-3xMMAF was tested on folate-receptor positive KB (600 to 0.002 nM dose range, 4 fold serial dilution), JEG-3 (1000 to 0.02 nM dose range, 6 fold serial dilution) and SW620 (100 to 0.02 nM dose range, 4 fold serial dilution); and folate-receptor negative SK-BR-3 (100 to 0.02 nM, 4 fold serial dilution). As culture media contained high folic acid content, cells were grown and assay performed in folic acid free-RPMI supplemented with 10% heat-inactivated FCS at 37° C., 5% CO₂. Cells in log-phase were collected, counted and plated at 1×10⁴ cells per well onto a 96-well microtiter assay plate. Cells were allowed to adhere to the plate by an overnight incubation at 37° C., 5% CO₂. FA-XTEN432-3xMMAF in the presence and absence of folic acid were introduced in a dose range in duplicates and plate incubated for 3 days. Cells in experimental wells with folic acid inhibitor were pre-incubated with folic acid for 30 min at 37° C., 5% CO₂ before the addition of folate-XTEN432-3xMMAF. After the appropriate incubation period, CellTiter-Glo reagent was added to each well, mixed for 2 minute on an orbital shaker. Plate was then centrifuged at 90 g and incubated at room temperature for an additional 10 minutes to stabilize the luminescent signal Luminescence signals were then read on a luminometer & IC₅₀s (half maximal inhibitory concentration) calculated with GraphPad Prism or equivalent software. Quantitative IC₅₀s enabled FA-XTEN-3xMMAF cytotoxic selectivity against folate receptor positive versus negative cell lines to be compared.

[0589] The FA-XTEN432-3xMMAF in the absence of folic acid inhibitor showed selective potent killing in folate receptor positive KB (IC₅₀ of 0.6 nM) (FIG. 58), JEG-3 (IC₅₀ of 0.4 nM) (FIG. 79A) and SW620 (IC₅₀ of 6.2 nM) (FIG. 79B) cells; but not on folate receptor negative SK-BR-3 (IC₅₀>100 nM) (FIG. 79C). Significantly, the cytotoxicity of FA-XTEN432-3xMMAF in KB, JEG-3 and SW620 was abrogated in the presence of folic acid indicating specificity of cytotoxic activity (FIG. 58, FIG. 79A and FIG. 79B).

### Example 42

### In Vivo Efficacy and Safety Evaluation of FA-3xMMAE-CCD-XTEN717 and FA-3xMMAE-CCD-BSRS1-XTEN713 Conjugates

[0590] To further tune the folate-XTEN drug conjugate for improved efficacy and safety as observed in example 36, the following modifications were introduced into the next generation folate conjugates: (1) MMAF toxin was replaced with MMAE; (2) MMAE were clustered at the N-terminal, close to the folate targeting moiety instead of evenly spaced on CXTEN; and (3) BSRS1 was placed immediately downstream of the MMAE toxin cluster. The two resultant proteins, FA-3xMMAE-CCD-XTEN717 and FA-3xMMAE-CCD-BSRS1-XTEN713 were evaluated in vivo in the KB xenograft model established in female nu/nu mice on a low-folate diet. In addition, instead of 3× injections for one week, only a single bolus injection was employed in this pilot study.

[0591] Seven days after KB cells implant, designated as Day 0, mice on low-folate diet bearing targeted tumor size of 100-200 mm³ were sorted into 2 groups of 3 animals per group. At Day 0, individual tumor volume of the mice enrolled in the study ranged from 83 to 147 mm³ and group mean tumor volume of the 2 groups were 111±33 and 111±30 mm³. Treatment was initiated on Day 0 with the intravenous administration of 120 nmol/kg equimolar concentration of FA-3xMMAE-CCD-XTEN717 and FA-3xMMAE-CCD-BSRS1-XTEN713. This is equivalent to administrating 9 mg/kg of folate-XTEN drug conjugate or 0.26 mg/kg of MMAE for both proteins (Table 40).

TABLE 40
Experimental design for dosing

| | | Total | Total | |
|---|---|---|---|---|
| | | conjugate | conjugate | |
| | | administered | administered | Total toxin |
| N | Agent | (mg/kg) | (nmol/kg) | equivalent |
| 8 | FA-CXTEN864- | 38 | 459 | 1 mg/kg |
| | 3xMMAF | | | MMAF |
| 3 | FA-3xMMAE-CCD- | 8.9 | 120 | 0.26 mg/kg |
| | XTEN717 | | | MMAE |
| 3 | FA-3xMMAE-CCD- | 9.0 | 120 | 0.26 mg/kg |
| | BSRS1-XTEN713 | | | MMAE |

[0592] Cessation or regression of tumor growth was determined through caliper measurement thrice per week until the study endpoint. The endpoint of the study was defined as tumor volume of 800 mm³ or 42 days, whichever comes first. To assess gross toxicity, animals were monitored individually for body weight three times per week. Any clinical signs of distress, deaths or adverse events were also recorded.

[0593] As shown in FIG. 80, both FA-3xMMAE-CCD-XTEN717 and FA-3xMMAE-CCD-BSRS1-XTEN713 drug conjugates were found to induce tumor regression for 19-21 days at a single bolus dose of 120 nmol/kg; after which tumor regrowth was observed for both conjugates. Although the number of mice per group is small, the tumor reduction efficacy of FA-3xMMAE-CCD-XTEN717 and FA-3xMMAE-CCD-BSRS1-XTEN713 appeared not to be significantly different from each other by student's t-test (p>0.05). Furthermore, FA-3xMMAE-CCD-XTEN717and FA-3xMMAE-CCD-BSRS1-XTEN713 were both found to be well tolerated with no visible weight loss (FIG. 81).

[0594] Significantly, as shown in FIG. 82 and reflected in Table 40, 120 nmol/kg (i.e. 9 mg/kg) of FA-3xMMAE-CCD-XTEN717and FA-3xMMAE-CCD-BSRS1-XTEN713 were drastically more effective than 459 nmol/kg (i.e. 38 mg/kg) of FA-XTEN864-3xMMAF in controlling tumor regression and growth.

[0595] Conclusions: The data strongly suggest that within the context of the KB xenograft model, FA-3xMMAE-CCD-XTEN717and FA-3xMMAE-CCD-BSRS1-XTEN713 are both highly efficacious and well tolerated, with efficacy achievable at 120 nmol/kg of drug conjugate. In this pilot KB xenograft study with limited number of animals, the BSRS1 composition appeared not to infer added advantage in tumor regression. Impressively, both FA-3xMMAE-CCD-XTEN717and FA-3xMMAE-CCD-BSRS1-XTEN713 were able to control tumor regression & growth at a substantially lower dose than that imparted by FA-XTEN864-3xMMAF. There are several factors that may account for this drastic improvement in efficacy; (1) MMAE is more effective than MMAF as the toxin payload; and/or (2) clustering of toxin at the N-terminal close to the targeting moiety may provide added advantage due to possible proteolytic cleavage of XTEN while in circulation.

### Example 43

### In Vivo Efficacy and Safety Evaluation of FA-3xMMAE-CCD-XTEN717, FA-3xMMAE-CXTEN864, FA-3xDM1-CCD-XTEN717, FA-3xMMAE-CCD-BSRS5-XTEN713 and FA-3xMMAE-CCD-BSRS6-XTEN13 Conjugates

[0596] To further understand and improve on the performance of the folate-XTEN drug conjugates evaluated in previous examples, the following studies will be executed to address the followings: (1) lowest dose concentration of FA-3xMMAE-CCD-XTEN717required to impart tumor stasis for 21 days; (2) impact of MMAE clustered at the N-terminal close to the folate targeting moiety versus MMAE evenly spaced on the CXTEN polymer; (3) will DM1 be an even better toxin payload than MMAE; (4) replace BSRS1 for BSRS5 and BSRS6 for enhance efficacy and safety margin; and (5) other in vivo folate receptor positive xenograft models.

[0597] Study 1: The FA-3xMMAE-CCD-XTEN717, FA-3xMMAE-CXTEN864 and FA-3xDM1-CCD-XTEN717 conjugates will be used to address questions 1, 2 and 3. Thirty-five female nu/nu mice on a low-folate diet with tumor volume in the range of 100 to 200 mm³ will be enrolled in the study as 7 groups of 5 mice per group. Designated as Day 0, treatment are initiated with the intravenous administration of FA-3xMMAE-CCD-XTEN717, FA-3xMMAE-CXTEN864 and FA-3xDM1-CCD-XTEN717 according to Table 41:

TABLE 41
Experimental design

| | | | Conjugate | Conjugate |
|---|---|---|---|---|
| Group | N | Protein | (nmol/kg) | (mg/kg) |
| 1 | 5 | Vehicle | 0 | 0 |
| 2 | 5 | FA-3xMMAE-CCD-XTEN717 | 120 | 8.9 |
| 3 | 5 | | 40 | 3.0 |
| 4 | 5 | | 13.3 | 1.0 |
| 5 | 5 | | 4.4 | 0.3 |
| 6 | 5 | FA-3xMMAE-CXTEN864 | 40 | 3.3 |
| 7 | 5 | FA-3xDM1-CCD-XTEN717 | 40 | 2.9 |

[0598] As the efficacy readout, tumor regression and growth are determined through caliper measurement thrice per week until the study endpoint. The endpoint of the study is defined as tumor volume of 800 mm³ or 30 days, whichever comes first. As an assessment of gross toxicity, animals are monitored individually for body weight three times per week. Any clinical signs of distress, deaths or adverse events are to be documented.

[0599] We anticipate the dose concentration of FA-3xMMAE-CCD-XTEN717capable of inducing tumor stasis for 21 days to fall within the dose range of 8.9 to 0.3 mg/kg. The head-to-head comparison of FA-3xMMAE-CCD-XTEN717versus FA-3xMMAE-CXTEN864 bearing the same nature and number of MMAE but differ in positioning will confirm if toxin positioning does indeed convey efficacy advantage. We speculate that toxin clustered at the N-terminal will be more efficacious or equivalent but certainly not inferior in efficacy to toxin configured to be evenly-spaced along the CXTEN polymer. In general, MMAE is believed to be more potent than DM1 in inducing cytotoxicity. We will evaluate toxin choice with the direct comparison of FA-3xMMAE-CCD-XTEN717against FA-3xDM1-CCD-XTEN717. Dosed at equimolar concentration, we predict FA-3xMMAE-CCD-XTEN717to be more effective than FA-3xDM1-CCD-XTEN717 in inducing tumor cessation and regression.

[0600] Study 2: The lack of performance of BSRS1 as described in Example 42 is likely influenced by the type and level of proteases present in the KB xenograft model used. To circumvent these possibilities, folate-XTEN drug conjugates bearing different BSRS composition will be tested in additional high folate-receptor expressing xenografts including but not limited to OVCAR3, IGROV3, OV-90, NCI-H2110 and LXFA-737. Specifically, FA-3xMMAE-CCD-BSRS1-XTEN713 will be evaluated in conjugation with FA-3xMMAE-CCD-BSRS5-XTEN713 and FA-3xMMAE-CCD-BSRS6-XTEN13 for their effectiveness in controlling tumor progression in KB, OVCAR and IGROV3 xenografts first. It is hypothesized that BSRS1, BSRS5 and BSRS6 PCM, each possessing different rate of protease susceptibility may behave differently in different tumor protease environment as represented by the different xenografts. When dosed at equimolar concentration, one BSRS may be more favorable than the others in the context of each xenograft.

### Example 44

### In Vitro Cytotoxicity and Specificity Evaluation of Anti-HER2scFv-3xMMAE-XTEN720, XTEN432-3xMMAE, anti-HER2scFv-3xDM1-XTEN720 and XTEN432-3xDM1 Conjugates

[0601] The specific cytotoxic activity of anti-HER2scFv-3xMMAE-XTEN720 and anti-HER2scFv-3xDM1-XTEN720 were compared to their corresponding non-targeting XTEN432-3xMMAE and XTEN432-3xDM1 precursors for their ability to effect cytotoxicity in a CellTiter-Glo cell viability assay. Using a panel of HER2 expressing cell lines which included but not limited to SK-BR-3, BT474, NCI-N87, SK-OV-3 and HCC1954, the specificity of anti-HER2scFv-3xMMAE-XTEN720 and anti-HER2scFv-3xDM1-XTEN720 were further elucidated in the presence and absence of trastuzumab as competitor (FIG. 83 and FIG. 84). Briefly, HER2 positive cells were plated at 1×10⁴ into each well of a 96-well microtiter plate and allowed to attach to the plate by an overnight incubation at 37° C., 5% CO₂. The anti-HER2scFv-3xMMAE-XTEN720 and anti-HER2scFv-3xDM1-XTEN720 conjugates, with and without trastuzumab treatment, as well as XTEN432-3xMMAE and XTEN432-3xDM1 conjugates were all introduced into the plate in a dose range (in duplicate) and plate was incubated for 3 days at 37° C., 5% CO₂. For SK-BR-3, BT474, HCC1954, a 3 fold serial dilution encompassing dose range of 1000 to 0.05 nM was employed; for NCI-N87, a 5 fold serial dilution of 1000 to 0.06 nM dose range; and SK-OV-3, a 4 fold serial dilution of 5000 to 0.19 nM dose range. After the appropriate incubation period, CellTiter-Glo reagent was added to each well, and the plate was mixed for 2 min on an orbital shaker. The plate was then centrifuged at 90×g and incubated at room temperature for an additional 10 min to stabilize the luminescent signal. Luminescence signals were then read on a luminometer and an IC₅₀s (half maximal inhibitory concentration) was calculated with GraphPad Prism software.

[0602] Results: As shown in FIG. 83 and Table 42, tested at equimolar concentration, anti-HER2scFv-3xMMAE-XTEN720, with the anti-HER2scFv targeting moiety, showed significantly higher cytotoxic killing than XTEN432-3xMMAE conjugate construct bearing no targeting moiety. Importantly, the addition of trastuzumab as competitor impaired the observed cell killing activity of anti-HER2scFv-3xMMAE-XTEN720 on the panel of cell lines tested, demonstrating the specificity of HER2-mediated cytotoxicity.

TABLE 42
IC50 determinations

| | IC₅₀ (nM) | | |
|---|---|---|---|
| | aHER2scFv- | aHER2scFv-3xMMAE- | |
| | 3xMMAE- | XTEN720 + | XTEN432- |
| Cell lines | XTEN720 | Trastuzumab | 3xMMAE |
| SK-BR-3 | 2.7 | >300 | >300 |
| BT474 | 4.0 | >300 | >300 |
| HCC1954 | 7.0 | >300 | >300 |
| NCI-N87 | 3.3 | NA | >1000 |
| SK-OV-3 | 48.7 | NA | >700 |

[0603] Similar results were obtained with the DM1-containing conjugates. The anti-HER2scFv-3xDM1-XTEN720 exhibited strong cytotoxicity that was inhibited by trastuzumab, while the corresponding non-targeted XTEN432-3xDM1 conjugate did not possess any significant in vitro cytotoxic activity (FIG. 84 and Table 43).

TABLE 43
IC50 determinations

| | IC₅₀ (nM) | | |
|---|---|---|---|
| | aHER2scFv- | aHER2scFv-3xDM1- | |
| | 3xDM1- | XTEN720 + | XTEN432- |
| Cell lines | XTEN720 | Trastuzumab | 3xDM1 |
| SK-BR-3 | 5 | >1000 | >1000 |
| BT474 | 113.7 | >1000 | >1000 |
| HCC1954 | 8 | >1000 | >360 |
| NCI-N87 | 4.8 | NA | >1000 |
| SK-OV-3 | 6 | NA | >700 |

[0604] Conclusions: The data suggest that under the experimental conditions, the anti-HER2scFv moiety imparts a HER2-mediated targeting effect that enhanced the cytotoxic activity of the XTEN-drug conjugates. Furthermore, both anti-HER2scFv-3xMMAE-XTEN720 and anti-HER2scFv-3xDM1-XTEN720 exerted strong cytotoxic activity in HER2 positive but trastuzumab resistant HCC1954 cell line; indicating XTEN-drug conjugates are more effective than trastuzumab antibody alone.

### Example 45

### In Vitro Cytotoxicity Evaluation of Anti-HER2scFv-3xMMAE-CCD-XTEN757 and anti-HER2scFv-3xMMAE-CCD-BSRS1-XTEN753 Conjugates

[0605] Using NCI-N87 cell line as a representative high HER2 expressing cell line, the cytotoxic activity of anti-HER2scFv-3xMMAE-CCD-XTEN757, anti-HER2scFv-3xMMAE-CCD-BSRS1-XTEN753 and protease-treated anti-HER2scFv-3xMMAE-CCD-BSRS1-XTEN753 were evaluated for their ability to effect cytotoxicity in a CellTiter-Glo cell viability assay. Briefly, NCI-N87 cells were plated at 1×10⁴ into each well of a 96-well microtiter plate and allowed to attach to the plate by an overnight incubation at 37° C., 5% CO₂. The anti-HER2scFv-3xMMAE-CCD-XTEN757, anti-HER2scFv-3xMMAE-CCD-BSRS1-XTEN753 and protease-treated anti-HER2scFv-3xMMAE-CCD-BSRS1-XTEN753 conjugates were all introduced into the plate in a 5 fold serial diluted 1000 to 0.06 nM dose range (in duplicate); and plate was incubated for 3 days at 37° C., 5% CO₂. After the appropriate incubation period, CellTiter-Glo reagent was added to each well, and the plate was mixed for 2 min on an orbital shaker. The plate was then centrifuged at 90×g and incubated at room temperature for an additional 10 min to stabilize the luminescent signal. Luminescence signals were then read on a luminometer and an IC₅₀s (half maximal inhibitory concentration) was calculated with GraphPad Prism software.

[0606] Results: As shown in FIG. 85, when tested at equimolar concentration, anti-HER2scFv-3xMMAE-CCD-XTEN757 and BSRS1 PCM containing intact anti-HER2scFv-3xMMAE-CCD-BSRS1-XTEN753 showed similar cytotoxic activity yielding an IC₅₀ of 2.2 nM and 3.1 nM respectively. However, upon protease treatment, the cleaved anti-HER2scFv-3xMMAE-CCD-BSRS1-XTEN753 exhibited a 5 fold stronger activity than the protease untreated anti-HER2scFv-3xMMAE-CCD-BSRS1-XTEN753 producing an IC₅₀ of 0.64 nM (FIG. 85).

[0607] Conclusions: The data suggest that under the experimental conditions, the protease-treated anti-HER2scFv-3xMMAE-CCD-BSRS1-XTEN753 imparts a stronger cytotoxic activity than its protease untreated counterpart.

### Example 46

### Efficacy and Safety Analysis of Anti-HER2scFv-3xMMAE-CXTEN720, Anti-HER2scFv-3xDM1-CXTEN720, anti-HER2scFv-3xMMAE-CCD-XTEN757, Anti-HER2scFv-3xMMAE-CCD-BSRS1-XTEN753 and Kadcyla in Female SCID Mice Bearing Human BT474 Breast Carcinoma

[0608] The following efficacy study is designed to decipher the effect of (1) MMAE versus DM1; (2) impact of MMAE clustered at the N-terminal close to the anti-HER2scFv targeting moiety versus MMAE evenly spaced on the CXTEN polymer; (3) impact of BSRS1; and performance of anti-HER2-XTEN drug conjugates in comparison to (4) benchmark Kadcyla.

[0609] Briefly, 1×10⁷ BT474 cells are injected subcutaneously in the flank of 68 female athymic nu/nu mice and allowed to form tumors, the size of which are measured with calipers and the volume calculated as 0.5×(L×W²), where L=length and W=width, in millimeters (mm) of the tumor. Designated as Day 0, 48 mice bearing targeted tumor size of 100-150 mm³ are selected from the 68 mice and sorted into 6 groups of 8 animals per group; with each group having approximately equivalent mean tumor volume. Treatment is initiated on Day 0 with the intravenous administration of PBS vehicle control, 30 nmol/kg of anti-HER2scFv-3xMMAE-CXTEN720, anti-HER2scFv-3xDM1-CXTEN720, anti-HER2scFv-3xMMAE-CCD-XTEN757, anti-HER2scFv-3xMMAE-CCD-BSRS1-XTEN753 and Kadcyla.

[0610] Cessation or regression of tumor growth is determined through caliper measurement three times per week till study endpoint. The endpoint of the study was defined as tumor volume of 1000 mm³ or 30 days, whichever comes first. Percent tumor growth inhibition (% TGI) is calculated for each treatment group and a % TGI 60% is considered therapeutically active. As an assessment of gross toxicity, animals are monitored individually for body weight three times per week till study endpoint. Any clinical signs of distress, deaths or adverse events are also noted.

[0611] It is expected that no tumor inhibition will be observed in BT474 tumor bearing mice administered with PBS vehicle. Based on the results obtained with the anti-HER2scFv-3xMMAE-XTEN720 drug conjugate in BT474 xenograft and performance of Kadcyla as documented in the literature, we expect all five drug conjugates (anti-HER2scFv-3xMMAE-CXTEN720, anti-HER2scFv-3xDM1-CXTEN720, anti-HER2scFv-3xMMAE-CCD-XTEN757, anti-HER2scFv-3xMMAE-CCD-BSRS1-XTEN753 and Kadcyla) to be more efficacious than vehicle in inducing tumor stasis or regression. (1) We speculate that MMAE will be more efficacious than DM1 and hence expect anti-HER2scFv-3xMMAE-CXTEN720 to out-perform anti-HER2scFv-3xDM1-CXTEN720 in tumor stasis and/or regression. (2) We believe anti-HER2scFv-3xMMAE-CCD-XTEN757 to be more effective or equivalent; but not inferior to anti-HER2scFv-3xMMAE-CXTEN720. (3) It remains to be seen if BT474 will provide the right tumor protease environment for BSRS1 PCM to be cleaved and thus for anti-HER2scFv-3xMMAE-CCD-BSRS1-XTEN753 to perform better than the corresponding anti-HER2scFv-3xMMAE-CCD-XTEN757 conjugate. (4) Dosed at equimolar, we anticipate one or more of the anti-HER2scFv-XTEN drug conjugate to out-perform Kadcyla due partly to scFv-XTEN having better tumor penetrability than a full length IgG. It is also expected that at 30 nmol/kg, all 5 drug conjugates compounds will be well tolerated with no body weight loss.

### Example 47

### Efficacy and Safety Analysis of Anti-HER2scFv-3xMMAE-CXTEN720, Anti-HER2scFv-3xDM1-CXTEN720, Anti-HER2scFv-3xMMAE-CCD-XTEN757, Anti-HER2scFv-3xMMAE-CCD-BSRS1-XTEN753 and Kadcyla in Female SCID Mice Bearing Human NCI-N87 Gastric Carcinoma and SK-OV-3 Ovarian Carcinoma

[0612] As a representation of tumor environment other than BT474, the anti-HER2scFv-3xMMAE-CXTEN720, anti-HER2scFv-3xDM1-CXTEN720, anti-HER2scFv-3xMMAE-CCD-XTEN757, anti-HER2scFv-3xMMAE-CCD-BSRS1-XTEN753 and Kadcyla will also be evaluated in NCI-N87 gastric carcinoma and SK-OV-3 ovarian carcinoma.

[0613] In the NCI-N87 xenograft model, 1x10⁷ NCI-N87 cells are subcutaneously administered into the flank of 68 female SCID mice; while in the SK-OV-3 model, 1 mm³ SK-OV-3 tumor fragment is subcutaneously implanted the flank of female athymic nu/nu mice. Designated as Day 0, 48 mice bearing targeted tumor size of 100-150 mm³ are selected from the 68 mice and sorted into 6 groups of 8 animals per group; with each group having approximately equivalent mean tumor volume. Treatment is initiated on Day 0 with the intravenous administration of PBS vehicle control, 30 nmol/kg of anti-HER2scFv-3xMMAE-CXTEN720, anti-HER2scFv-3xDM1-CXTEN720, anti-HER2scFv-3xMMAE-CCD-XTEN757, anti-HER2scFv-3xMMAE-CCD-BSRS1-XTEN753 and Kadcyla.

[0614] Cessation or regression of tumor growth is determined through caliper measurement three times per week till study endpoint. The endpoint of the NCI-N87 study is defined as tumor volume of 800 mm³ or 30 days, whichever comes first. The endpoint for the SK-OV-3 study is defined as 2000 mm³ or 30 days, whichever comes first. Percent tumor growth inhibition (% TGI) is calculated for each treatment group in both NCI-N87 and SK-OV-3 studies. Treatment group with % TGI 60% is considered therapeutically active. As an assessment of gross toxicity, animals are monitored individually for body weight three times per week till study endpoint. Any clinical signs of distress, deaths or adverse events are also noted.

[0615] It is expected that no tumor inhibition will be observed in NCI-N87 and SK-OV-3 tumor bearing mice administered with PBS vehicle. Based on the results obtained with the anti-HER2scFv-3xMMAE-XTEN720 drug conjugate in BT474 xenograft and performance of Kadcyla as documented in the literature in NCI-N87 and SK-OV-3 models, we expect all five drug conjugates (anti-HER2scFv-3xMMAE-CXTEN720, anti-HER2scFv-3xDM1-CXTEN720, anti-HER2scFv-3xMMAE-CCD-XTEN757, anti-HER2scFv-3xMMAE-CCD-BSRS1-XTEN753 and Kadcyla) to be more efficacious than vehicle in inducing tumor stasis or regression for both xenograft models. (1) As with the BT474 model, we speculate that MMAE will be more effective than DM1 and hence anticipate anti-HER2scFv-3xMMAE-CXTEN720 to perform better than anti-HER2scFv-3xDM1-CXTEN720 in inducing tumor cessation and/or regression. (2) We believe anti-HER2scFv-3xMMAE-CCD-XTEN757 to be more or of equivalent efficacy; but not inferior to anti-HER2scFv-3xMMAE-CXTEN720. (3) It remains to be seen either or both NCI-N87 and SK-OV-3 xenografts will provide the right tumor protease environment for BSRS1 PCM to be cleaved and thus for anti-HER2scFv-3xMMAE-CCD-BSRS1-XTEN753 to perform better than anti-HER2scFv-3xMMAE-CCD-XTEN757. (4) Dosed at equimolar, we anticipate one or more of the anti-HER2scFv-XTEN drug conjugate to out-perform Kadcyla partially due to scFv-XTEN having better tumor penetrability than a full length IgG. It is also expected that at 30 nmol/kg, all 5 drug conjugates compounds will be well tolerated with no body weight loss.

[0616] It is possible that BSRS1 PCM containing anti-HER2-XTEN drug conjugate may not provide added advantage in BT474, NCI-N87 or SK-OV-3 as compared to the corresponding non-BSRS1 containing conjugate. If this is indeed the case, the BSRS1 moiety will be replaced with other PCM and resulting conjugates will be evaluated in HER2 positive xenografts.

### Example 48

### Elastase Digestion and In Vitro Activity Test

[0617] It had been speculated that neutrophil elastase, a serine protease with broad substrate specificity, may be able to degrade XTEN. An experiment was designed to demonstrate the susceptibility of XTEN to protease cleavage. 10 μM of purified XTEN_AE864 was incubated with 1:1000 or 1:100 molar ratio (elastase:XTEN) of human neutrophil elastase (R&D Systems) at 37° C. for 2 hours. Samples before and after digestion were analyzed on SDS-PAGE gel followed with coomassie staining (FIG. 86). Partial degradation was observed for XTEN_AE864 when incubating with neutrophil elastase at the 1:1000 molar ratio, and XTEN_AE864 was completely digested by neutrophil elastase at the 1:100 molar ratio.

[0618] In the context of targeted conjugate compositions wherein the cytotoxic drugs are conjugated to the CCD, the compositions are designed so that the cytotoxic drugs are in closer proximity with the targeting moiety compared with targeted compositions wherein the payloads are conjugated to regular cysteine containing XTEN and the cysteine are dispersed across the length of the XTEN. The rationale for the design was that when subjected to protease digestion on XTEN, a higher percentage of drug molecules linked to the CCD in the targeted conjugate compositions are more likely to stay linked with the associated targeting moiety compared to drugs linked more distally in the XTEN, which will lead to higher probability of the drug molecules getting internalized when the targeting moiety binds the target tumor cell, leading to cell death. Since the in vivo environment has a lot of various proteases that may degrade XTEN, the targeted conjugate compositions with payloads linked to the CCD would therefore result in better in vivo efficacy than regular cysteine-containing XTEN. Methods described below can be used to test this hypothesis in vitro.

[0619] Folate-CCD-XTEN-3xDM1 (containing 3 molecules of DM1, as representative of a targeted conjugate composition) and folate-CXTEN-3xDM1 (containing 3 molecules of DM1, as representative of a targeted XTEN with the DM1 payloads conjugated to the XTEN) prepared with similar methods as described in Example 13 and Example 20 will be incubated with neutrophil elastase at 1:1000 molar ratio at 37° C. Samples will be removed at different time points and will be monitored by SDS-PAGE to monitor the degradation progress, and will be evaluated in a cell-based assay for their killing activity in KB cells, which have folate receptors, as described in Example 35. We expect that at certain time point, the samples will reach a degradation level that a low percentage of the folate-CXTEN-3xDM1 will still retain all 3 of the DM1 drugs linked with folate, while a significantly higher percentage of the folate-CCD-XTEN-3xDM1 will retain all 3 DM1 drugs linked with folate. Because DM1 linked to XTEN without folate is not toxic to cells, the cytotoxic effect is only contributed by DM1 that remain linked to the folate targeting moiety. When testing these samples in the cell-based assay, we expect similar IC50 for all samples since this is only relevant for the affinity between folate and its receptor, but the percentage of cell killing would be expected to become lower as the DM1 drug falls off from the folate as a result of proteolysis of the composition.

### Example 49

### In Vitro Cytotoxicity Evaluation of FA-CCD1-3xMMAE-AE717, FA-CCD1-3xMMAE-BSRS1-AE713, FA-CCD7-3xMMAE-BSRS4-AE717 and the Corresponding Non-Targeted Conjugates

[0620] The cytotoxic activity of FA-CCD1-3xMMAE-AE717, protease-treated and untreated FA-CCD1-3xMMAE-BSRS1-AE713, protease-treated and untreated FA-CCD7-3xMMAE-BSRS4-AE717 and the corresponding non-targeted controls CCD1-3xMMAE-AE717, CCD1-3xMMAE-BSRS1-AE713 and CCD7-3xMMAE-BSRS4-AE717 were compared for the ability to effect cytotoxicity in an in vitro assay utilizing the folate receptor positive KB cell line. The KB cells were grown and the assay performed in folic acid-free RPMI plus 10% heat-inactivated fetal calf serum to minimize folic acid content in the cell culture. Briefly, KB cells were plated at 1×10⁴ into each well of a 96-well microtiter plate and allowed to attach to the plate by an overnight incubation at 37° C., 5% CO₂. All eight proteins were all introduced into the plate as a 4 fold serial dilution dose range with initial concentration ranging from 192 to 81 nM. After 72 h incubation, CellTiter-Glo reagent was added to each well according to manufacturer's instruction and luminescence signals read on a luminometer; and IC₅₀s calculated with GraphPad Prism software.

[0621] Results: As shown in Table 44, FA-CCD1-3xMMAE-AE717, FA-CCD1-3xMMAE-BSRS1-AE713 and FA-CCD7-3xMMAE-BSRS4-AE717 all showed similar and strong cytotoxic activity with IC₅₀ of 1.41±0.1 nM, 1.55 nM and 1.05 nM respectively. Data demonstrated that the introduction of intact CCD and BSRS sequences have no apparent impact on in vitro cytotoxic activity in KB cells. As expected, all the non-targeted CCD1-3xMMAE-AE717, protease-cleaved non-targeted CCD1-3xMMAE-BSRS1-AE713 and protease-cleaved non-targeted CCD7-3xMMAE-BSRS4-AE717 exhibited minimal cytotoxicity (IC₅₀>100 nM). Interestingly, protease-treated and untreated FA-CCD1-3xMMAE-BSRS1-AE713 yielded equivalent activity (IC₅₀ 1.5 nM versus 1.1±1.7 nM). Similarly, protease-treated and untreated FA-CCD7-3xMMAE-BSRS4-AE717 also exhibited comparable cytotoxicity ((IC₅₀ 1.05 nM versus 2.4±0.9 nM).

TABLE 44
IC50 determinations

| | Pro- | | | | |
|---|---|---|---|---|---|
| | tease- | IC50 (nM) | | | |
| | treat- | Assay | Assay | Aver- | |
| Conjugate | ment | 1 | 2 | age | SD |
| FA-CCD1-3xMMAE-AE717 | No | 1.32 | 1.5 | 1.14 | 0.1 |
| FA-CCD1-3xMMAE-BSRS1- | No | | 1.55 | | |
| AE713 | | | | | |
| FA-CCD7-3xMMAE-BSRS4- | No | | 1.05 | | |
| AE717 | | | | | |
| FA-CCD1-3xMMAE-BSRS1- | Yes | 1.1 | 1.17 | 1.1 | 1.7 |
| AE713 | | | | | |
| FA-CCD7-3xMMAE-BSRS4- | Yes | 1.75 | 3.01 | 2.4 | 0.9 |
| AE717 | | | | | |
| CCD1-3xMMAE-AE717 | No | >100 | >100 | | |
| CCD1-3xMMAE-BSRS1-AE713 | Yes | >100 | | | |
| CCD7-3xMMAE-BSRS4-AE717 | Yes | >100 | | | |

[0622] Conclusions: The data suggest that under the experimental conditions described, XTEN did not hinder the folate targeting moiety from its interaction with the folate receptors present on the KB cells.

### Example 50

### Pharmacokinetics and Bio-Distribution Analysis of BSRS-XTEN864 in the 11292 Xenograft Model

[0623] The NCI-H292 xenograft has been reported in the literature to possess the right tumor environment to successfully cleave RS3. All BSRS PCM contains the RS3 sequence. To better evaluate and screen for efficacy of the different BSRS PCM for in vivo cleavage, we will utilize the NCI-H2892 xenograft model to evaluate BSRS1-XTEN864, BSRS2-XTEN864, BSRS3-XTEN864, BSRS4-XTEN864, BSRS5-XTEN864 and BSRS6-XTEN864 via a bio-distribution study. Each BSRS bearing XTEN864 and the non-BSRS containing XTEN864 control will be orthogonally labeled with 2 rare lanthanide earth ions, one metal at the N-terminal and the other metal immediately downstream of the BSRS sequence. Using 6 available rare earth metals, 3 conjugates are evaluated per group as a mixture.

[0624] Briefly, six groups of 3 mice per group of female SCID mice bearing NCI-H292 tumor volume of 250-350 mm³ will be injected with a mixture of 3 conjugates (two dual-labeled BSRS-XTEN864 and one dual-labeled XTEN864 control) per group. For tissue bio-distribution analysis, 3 mice are sacrificed on day 5. At terminal endpoint, tumor, heart, kidneys, liver, lungs, spleen, pancreas and brain are harvested, rinsed in PBS, blotted dry, weigh and snap frozen. The amount of the respective metal present in the various tissues is quantitated by ICP-MS and data express as percent injected dose per g tissue (% ID/g).

[0625] For the BSRS that is cleaved in the NCI-H292 tumor environment, on day 5, only 1 metal (conjugated immediately downstream of the BSRS sequence) will be detected in the tumor sample; the N-terminal positioned metal of this BRSR-XTEN864 will be eliminated by day 5 due to its short half-life of a few hours. For BSRS that is not cleaved by H292 tumor environment, both metals (i.e. N-terminal positioned and downstream of the BSRS sequence) will be detected. In this manner, an in vivo functional BSRS could be identified for use in targeted-XTEN-drug conjugates.

### Example 51

### Analytical Size Exclusion Chromatography of XTEN Linked with Diverse Payloads

[0626] Size exclusion chromatography analyses were performed on fusion proteins containing various therapeutic proteins and unstructured recombinant proteins of increasing length. An exemplary assay used a TSKGel-G4000 SWXL (78 mm×30cm) column in which 40 μg of purified glucagon fusion protein at a concentration of 1 mg/ml was separated at a flow rate of 0.6 ml/min in 20 mM phosphate pH 6.8, 114 mM NaCl. Chromatogram profiles were monitored using OD214 nm and OD280 nm. Column calibration for all assays were performed using a size exclusion calibration standard from BioRad; the markers include thyroglobulin (670 kDa), bovine gamma-globulin (158 kDa), chicken ovalbumin (44 kDa), equine myoglobuin (17 kDa) and vitamin B12 (1.35 kDa). Based on the SEC analyses for all constructs evaluated, the apparent molecular weights, the apparent molecular weight factor (expressed as the ratio of apparent molecular weight to the calculated molecular weight) and the hydrodynamic radius (R_{H} in nm) are shown in Table 45. The results indicate that incorporation of different XTENs of 576 amino acids or greater confers an apparent molecular weight for the fusion protein of approximately 339 kDa to 760, and that XTEN of 864 amino acids or greater confers an apparent molecular weight greater than approximately 800 kDA. The results of proportional increases in apparent molecular weight to actual molecular weight were consistent for fusion proteins created with XTEN from several different motif families; i.e., AD, AE, AF, AG, and AM, with increases of at least four-fold and ratios as high as about 17-fold. Additionally, the incorporation of XTEN fusion partners with 576 amino acids or more into fusion proteins with the various payloads (and 288 residues in the case of glucagon fused to Y288) resulted with a hydrodynamic radius of 7 nm or greater; well beyond the glomerular pore size of approximately 3-5 nm. The addition of 3 different lengths of XTEN to the scFv of anti-Her2 resulted in increases in Apparent Molecular Weight and hydrodynamic radius that were proportional to the increase in XTEN length, indicating that the properties of scFv can be adjusted depending on the desired properties, but that with an XTEN as short as 288 amino acids, the hydrodynamic radius is larger than the renal pore size. Accordingly, it is expected that fusion proteins comprising XTEN have reduced renal clearance, contributing to increased terminal half-life and improving the therapeutic or biologic effect relative to a corresponding un-fused biologic protein or antibody fragment.

TABLE 45
SEC analysis of various polypeptides

| | | | | | Apparent | |
|---|---|---|---|---|---|---|
| Con- | XTEN or | | Actual | Appar- | Molecular | |
| struct | fusion | Therapeutic | MW | ent MW | Weight | R_{H} |
| Name | partner | Protein | (kDa) | (kDa) | Factor | (nm) |
| AC14 | Y288 | Glucagon | 28.7 | 370 | 12.9 | 7.0 |
| AC28 | Y144 | Glucagon | 16.1 | 117 | 7.3 | 5.0 |
| AC34 | Y72 | Glucagon | 9.9 | 58.6 | 5.9 | 3.8 |
| AC33 | Y36 | Glucagon | 6.8 | 29.4 | 4.3 | 2.6 |
| AC89 | AF120 | Glucagon | 14.1 | 76.4 | 5.4 | 4.3 |
| AC88 | AF108 | Glucagon | 13.1 | 61.2 | 4.7 | 3.9 |
| AC73 | AF144 | Glucagon | 16.3 | 95.2 | 5.8 | 4.7 |
| AC53 | AG576 | GFP | 74.9 | 339 | 4.5 | 7.0 |
| AC39 | AD576 | GFP | 76.4 | 546 | 7.1 | 7.7 |
| AC41 | AE576 | GFP | 80.4 | 760 | 9.5 | 8.3 |
| AC52 | AF576 | GFP | 78.3 | 526 | 6.7 | 7.6 |
| AC398 | AE288 | FVII | 76.3 | 650 | 8.5 | 8.2 |
| AC404 | AE864 | FVII | 129 | 1900 | 14.7 | 10.1 |
| AC85 | AE864 | Exendin-4 | 83.6 | 938 | 11.2 | 8.9 |
| AC114 | AM875 | Exendin-4 | 82.4 | 1344 | 16.3 | 9.4 |
| AC143 | AM875 | hGH | 100.6 | 846 | 8.4 | 8.7 |
| AC302 | AE912 + | hGH | 119.1 | 2,287 | 19.2 | 11.0 |
| | AE144 | | | | | |
| AC227 | AM875 | IL-1ra | 95.4 | 1103 | 11.6 | 9.2 |
| AC228 | AM1318 | IL-1ra | 134.8 | 2286 | 17.0 | 10.5 |
| AC493 | AE864 | Factor IX | 127.7* | 3967 | 31.1 | 12.2 |
| AC616 | AE864 | GLP2-2G | 83.1 | 1427 | 17.2 | 10 |
| AC647 | AE864 | Ghrelin | 82.7 | 996 | 12 | 9.2 |
| AC659 | AE864 | C-peptide | 82.7 | 822 | 10 | 8.8 |
| AC663 | AE1296 | C-peptide | 122.2 | 2348 | 19.2 | 11.1 |
| AC434 | AE288 | aaT | 71.1 | 500 | 7.0 | 7.7 |
| AC435 | AE576 | aaT | 97.5 | 1,127 | 11.6 | 9.5 |
| AC345 | AM875 | aaT | 122.6 | 1,390 | 11.3 | 9.9 |
| AC450 | AE288 | aHer2_scFv | 56.2 | 312 | 5.5 | 6.7 |
| AC451 | AE576 | aHer2_scFv | 82.6 | 760 | 9.2 | 8.6 |
| AC452 | AE864 | aHer2_scFv | 109.1 | 1,390 | 12.7 | 9.9 |

*excluding glycosylation

The application's sequence listing, which the Patent Office published only in electronic form, follows.

SEQUENCE LISTING (771 sequences)

SEQ ID NO: 1 - protein, 6 aa, Artificial Sequence
  Description of Artificial Sequence: Synthetic peptide
SGGGGS

SEQ ID NO: 2 - protein, 5 aa, Artificial Sequence
  Description of Artificial Sequence: Synthetic peptide
GGGGS

SEQ ID NO: 3 - protein, 5 aa, Artificial Sequence
  Description of Artificial Sequence: Synthetic peptide
  MOD_RES (3)..(3): Any amino acid
LPXTG

SEQ ID NO: 4 - protein, 6 aa, Artificial Sequence
  Description of Artificial Sequence: Synthetic peptide
PLGLAG

SEQ ID NO: 5 - protein, 5 aa, Artificial Sequence
  Description of Artificial Sequence: Synthetic peptide
CNGRC

SEQ ID NO: 6 - protein, 6 aa, Artificial Sequence
  Description of Artificial Sequence: Synthetic peptide
CNGRCG

SEQ ID NO: 7 - protein, 5 aa, Artificial Sequence
  Description of Artificial Sequence: Synthetic peptide
GNGRG

SEQ ID NO: 8 - protein, 5 aa, Artificial Sequence
  Description of Artificial Sequence: Synthetic peptide
KNGRE

SEQ ID NO: 9 - protein, 5 aa, Artificial Sequence
  Description of Artificial Sequence: Synthetic peptide
GNGRG

SEQ ID NO: 10 - protein, 9 aa, Artificial Sequence
  Description of Artificial Sequence: Synthetic peptide
CVLNGRMEC

SEQ ID NO: 11 - protein, 6 aa, Artificial Sequence
  Description of Artificial Sequence: Synthetic peptide
NGRAHA

SEQ ID NO: 12 - protein, 13 aa, Artificial Sequence
  Description of Artificial Sequence: Synthetic peptide
CNGRCVSGCAGRC

SEQ ID NO: 13 - protein, 9 aa, Artificial Sequence
  Description of Artificial Sequence: Synthetic peptide
CGNKRTRGC

SEQ ID NO: 14 - protein, 10 aa, Artificial Sequence
  Description of Artificial Sequence: Synthetic peptide
TAASGVRSMH

SEQ ID NO: 15 - protein, 10 aa, Artificial Sequence
  Description of Artificial Sequence: Synthetic peptide
LTLRWVGLMS

SEQ ID NO: 16 - protein, 9 aa, Artificial Sequence
  Description of Artificial Sequence: Synthetic peptide
CNRRTKAGC

SEQ ID NO: 17 - protein, 9 aa, Artificial Sequence
  Description of Artificial Sequence: Synthetic peptide
CLSDGKRKC

SEQ ID NO: 18 - protein, 9 aa, Artificial Sequence
  Description of Artificial Sequence: Synthetic peptide
CREAGRKAC

SEQ ID NO: 19 - protein, 9 aa, Artificial Sequence
  Description of Artificial Sequence: Synthetic peptide
CAGRRSAYC

SEQ ID NO: 20 - protein, 6 aa, Artificial Sequence
  Description of Artificial Sequence: Synthetic peptide
CRSRKG

SEQ ID NO: 21 - protein, 7 aa, Artificial Sequence
  Description of Artificial Sequence: Synthetic peptide
CKAAKNK

SEQ ID NO: 22 - protein, 9 aa, Artificial Sequence
  Description of Artificial Sequence: Synthetic peptide
CSRPRRSEC

SEQ ID NO: 23 - protein, 5 aa, Artificial Sequence
  Description of Artificial Sequence: Synthetic peptide
CGKRK

SEQ ID NO: 24 - protein, 5 aa, Artificial Sequence
  Description of Artificial Sequence: Synthetic peptide
CDTRL

SEQ ID NO: 25 - protein, 7 aa, Artificial Sequence
  Description of Artificial Sequence: Synthetic peptide
CGTKRKC

SEQ ID NO: 26 - protein, 42 aa, Artificial Sequence
  Description of Artificial Sequence: Synthetic polypeptide
GSPGAGSCAGSPTSTEEGTSESACSPEGPGTSTEPSEGSCGG

SEQ ID NO: 27 - protein, 32 aa, Artificial Sequence
  Description of Artificial Sequence: Synthetic polypeptide
GSPGPAGCGAPGPSGGPTCTGSTSATPGACSA

SEQ ID NO: 28 - protein, 42 aa, Artificial Sequence
  Description of Artificial Sequence: Synthetic polypeptide
GSPGAGSCTETSPSTPTESPEAGCSGSGSPESPSGTEASCTS

SEQ ID NO: 29 - protein, 32 aa, Artificial Sequence
  Description of Artificial Sequence: Synthetic polypeptide
GSPGAGSCTETSPSTPTSCPEAGSGSGSPCSP

SEQ ID NO: 30 - protein, 26 aa, Artificial Sequence
  Description of Artificial Sequence: Synthetic peptide
GSPGAGSCTETSPSTCPTESPEACGS

SEQ ID NO: 31 - protein, 18 aa, Artificial Sequence
  Description of Artificial Sequence: Synthetic peptide
GSPGAGSCTETCSPSCTP

SEQ ID NO: 32 - protein, 14 aa, Artificial Sequence
  Description of Artificial Sequence: Synthetic peptide
GAPCGAGCAGPCGP

SEQ ID NO: 33 - protein, 14 aa, Artificial Sequence
  Description of Artificial Sequence: Synthetic peptide
GSPGAGSCTCTCSP

SEQ ID NO: 34 - protein, 12 aa, Artificial Sequence
  Description of Artificial Sequence: Synthetic peptide
GSPGAGSCCCTE

SEQ ID NO: 35 - protein, 22 aa, Artificial Sequence
  Description of Artificial Sequence: Synthetic peptide
GSPCGAGESTTCSPSTPTSCPE

SEQ ID NO: 36 - protein, 14 aa, Artificial Sequence
  Description of Artificial Sequence: Synthetic peptide
GSPCGAGCSTTCSP

SEQ ID NO: 37 - protein, 144 aa, Artificial Sequence
  Description of Artificial Sequence: Synthetic polypeptide
GSPGAGSCAGSPTSTEEGTSESACSPEGPGTSTEPSEGSCGPSPAGSPTSTEEGTCTEPSEGSAPGTSEPTCSGSAPGTSESATPESCGPSEPATSGSETPGSCAPTSGSETPGSPAGSCTSTEEGTSESATPESCGPTESASG

SEQ ID NO: 38 - protein, 104 aa, Artificial Sequence
  Description of Artificial Sequence: Synthetic polypeptide
SGTASSSCPGSSTPSGATCGSPGTPGSGTCASSSPGSSTPCSGATGSPGSSCTPSGATGSPGCSSPSASTGTGCPGSSPSASTGCTGPGASPGTSCSTGSPGTP

SEQ ID NO: 39 - protein, 144 aa, Artificial Sequence
  Description of Artificial Sequence: Synthetic polypeptide
GSEPATSCGSETPGTSESATPESCGPGSEPATSGSETPGCSPAGSPTSTEEGTSTCPSEGSAPGSEPATSGCSETPGSEPATSGSETCPGSEPATSGSETPGTCSTEPSEGSAPGTSESCATPESGPGSEPATSGCSETPGTST

SEQ ID NO: 40 - protein, 104 aa, Artificial Sequence
  Description of Artificial Sequence: Synthetic polypeptide
GSEPATSCGSETPGTSESCATPESGPGSPCATSGSETPGSCPAGSPTSTGTCSTEPSEGSAPCGSEPATSGSTCPGSEPATSGSCTPGSEPATSGCSETPGTST

SEQ ID NO: 41 - protein, 80 aa, Artificial Sequence
  Description of Artificial Sequence: Synthetic polypeptide
GSPGAGSCTETSPSTCPTESPEACGSGSGSPCSPSGTEACSTSGSEGCSPSSTAPCGPTETEGCTTSSGPPCPESATSEG

SEQ ID NO: 42 - protein, 42 aa, Artificial Sequence; identical to SEQ ID NO: 26
  Description of Artificial Sequence: Synthetic polypeptide

SEQ ID NO: 43 - protein, 42 aa, Artificial Sequence; identical to SEQ ID NO: 26
  Description of Artificial Sequence: Synthetic polypeptide

SEQ ID NO: 44 - protein, 42 aa, Artificial Sequence; identical to SEQ ID NO: 26
  Description of Artificial Sequence: Synthetic polypeptide

SEQ ID NO: 45 - protein, 42 aa, Artificial Sequence; identical to SEQ ID NO: 26
  Description of Artificial Sequence: Synthetic polypeptide

SEQ ID NO: 46 - protein, 14 aa, Artificial Sequence
  Description of Artificial Sequence: Synthetic peptide
GAPCGAGCAGPCGP

SEQ ID NO: 47 - protein, 42 aa, Artificial Sequence; identical to SEQ ID NO: 26
  Description of Artificial Sequence: Synthetic polypeptide

SEQ ID NO: 48 - protein, 42 aa, Artificial Sequence; identical to SEQ ID NO: 26
  Description of Artificial Sequence: Synthetic polypeptide

SEQ ID NO: 49 - protein, 42 aa, Artificial Sequence; identical to SEQ ID NO: 26
  Description of Artificial Sequence: Synthetic polypeptide

SEQ ID NO: 50 - protein, 42 aa, Artificial Sequence; identical to SEQ ID NO: 26
  Description of Artificial Sequence: Synthetic polypeptide

SEQ ID NO: 51 - protein, 42 aa, Artificial Sequence; identical to SEQ ID NO: 26
  Description of Artificial Sequence: Synthetic polypeptide

SEQ ID NO: 52 - protein, 42 aa, Artificial Sequence
  Description of Artificial Sequence: Synthetic polypeptide
GAPGSPACGSPTSTEEGTSESATCPESGPGSEPATSGSTCPA

SEQ ID NO: 53 - protein, 42 aa, Artificial Sequence
  Description of Artificial Sequence: Synthetic polypeptide
TEPSEGSCAPGSPAGSPTSTEEGCTSESATPESGPGSEPCAT

SEQ ID NO: 54 - protein, 42 aa, Artificial Sequence
  Description of Artificial Sequence: Synthetic polypeptide
PAGSPTSCTEEGTSTEPSEGSAPCGTSESATPESGPGSPCAT

SEQ ID NO: 55 - protein, 42 aa, Artificial Sequence
  Description of Artificial Sequence: Synthetic polypeptide
SEPATSGCSETPGTSESATPESGCPGTSTEPSEGSAPGSCPA

SEQ ID NO: 56 - protein, 42 aa, Artificial Sequence
  Description of Artificial Sequence: Synthetic polypeptide
GAPSPSACSTGTGPGTPGSGTASCSSPGSSTPSGATGSPCGP

SEQ ID NO: 57 - protein, 42 aa, Artificial Sequence
  Description of Artificial Sequence: Synthetic polypeptide
GPGTPGSCGTASSSPGSSTPSGACTGSPGSSPSASTGTGCPG

SEQ ID NO: 58 - protein, 42 aa, Artificial Sequence
  Description of Artificial Sequence: Synthetic polypeptide
SPSASTGCTGPGASPGTSSTGSPCGTPGSGTASSSPGSSCTP

SEQ ID NO: 59 - protein, 42 aa, Artificial Sequence
  Description of Artificial Sequence: Synthetic polypeptide
SASTGTGCPGASPGTSSTGSPGTCPGSGTASSSPGSSTPCSG

SEQ ID NO: 60 - protein, 42 aa, Artificial Sequence
  Description of Artificial Sequence: Synthetic polypeptide
GTSTPESCGSASPGTSPSGESSTCAPGTSPSGESSTAPGCST

SEQ ID NO: 61 - protein, 42 aa, Artificial Sequence
  Description of Artificial Sequence: Synthetic polypeptide
AESPGPGCSTSESPSGTAPGSTSCSTAESPGPGTSPSGSCST

SEQ ID NO: 62 - protein, 42 aa, Artificial Sequence
  Description of Artificial Sequence: Synthetic polypeptide
GSTSSTACSPGPGSTSSTAESPGCPGSTSESPSGTAPGSCTS

SEQ ID NO: 63 - protein, 42 aa, Artificial Sequence
  Description of Artificial Sequence: Synthetic polypeptide
ESSTAPGCSTSESPSGTAPGSTSCSPSGTAPGTSPSGESCST

SEQ ID NO: 64 - protein, 14 aa, Artificial Sequence
  Description of Artificial Sequence: Synthetic peptide
GSPCATSCGSTCPG

SEQ ID NO: 65 - protein, 14 aa, Artificial Sequence
  Description of Artificial Sequence: Synthetic peptide
GTSCSATCPESCGP

SEQ ID NO: 66 - protein, 14 aa, Artificial Sequence
  Description of Artificial Sequence: Synthetic peptide
GTSCTEPCSEGCSA

SEQ ID NO: 67 - protein, 14 aa, Artificial Sequence
  Description of Artificial Sequence: Synthetic peptide
GSTCSESCPSGCTA

SEQ ID NO: 68 - protein, 14 aa, Artificial Sequence
  Description of Artificial Sequence: Synthetic peptide
GTSCTPSCGSACSP

SEQ ID NO: 69 - protein, 14 aa, Artificial Sequence
  Description of Artificial Sequence: Synthetic peptide
GTSCPSGCSSTCAP

SEQ ID NO: 70 - protein, 14 aa, Artificial Sequence
  Description of Artificial Sequence: Synthetic peptide
GSTCSSTCAESCPG

SEQ ID NO: 71 - protein, 14 aa, Artificial Sequence
  Description of Artificial Sequence: Synthetic peptide
GTPCGSGCTASCSS

SEQ ID NO: 72 - protein, 14 aa, Artificial Sequence
  Description of Artificial Sequence: Synthetic peptide
GSSCTPSCGATCGS

SEQ ID NO: 73 - protein, 14 aa, Artificial Sequence
  Description of Artificial Sequence: Synthetic peptide
GSSCPSACSTGCTG

SEQ ID NO: 74 - protein, 14 aa, Artificial Sequence
  Description of Artificial Sequence: Synthetic peptide
GASCPGTCSSTCGS

SEQ ID NO: 75 - protein, 10 aa, Artificial Sequence
  Description of Artificial Sequence: Synthetic peptide
GSPGAGSCAG

SEQ ID NO: 76 - protein, 6 aa, Artificial Sequence
  Description of Artificial Sequence: Synthetic peptide
GAPCGA

SEQ ID NO: 77 - DNA, 126 bp, Artificial Sequence
  Description of Artificial Sequence: Synthetic polynucleotide
ggctctccaggtgcaggtagctgcgctggtagcccaacctctaccgaagaaggtacctctgaatccgcttgttccccagaaggtcctggtactagcactgagccaagcgaaggttcttgtggcggt

SEQ ID NO: 78 - DNA, 96 bp, Artificial Sequence
  Description of Artificial Sequence: Synthetic oligonucleotide
ggctctccaggtccggccggttgcggtgcaccgggcccgagtggtggtcctacatgtaccggcagtaccagcgcaacacctggtgcatgcagcgcc

SEQ ID NO: 79 - DNA, 126 bp, Artificial Sequence
  Description of Artificial Sequence: Synthetic polynucleotide
ggctctccaggtgcaggtagctgtacggaaaccagcccgagcaccccgaccgagtccccggaagcgggctgcagcggtagcggcagcccggagagcccgagcggtaccgaggcgagctgtacgtcc

SEQ ID NO: 80 - DNA, 96 bp, Artificial Sequence
  Description of Artificial Sequence: Synthetic oligonucleotide
ggctctccaggtgcaggtagctgtacggaaaccagcccgagcaccccgacctcctgcccggaagcgggcagcggtagcggcagcccgtgtagcccg

SEQ ID NO: 81 - DNA, 78 bp, Artificial Sequence
  Description of Artificial Sequence: Synthetic oligonucleotide
ggctctccaggtgcaggtagctgtacggaaaccagcccgagcacctgcccgaccgagtccccggaagcgtgtggcagc

SEQ ID NO: 82 - DNA, 54 bp, Artificial Sequence
  Description of Artificial Sequence: Synthetic oligonucleotide
ggctctccaggtgcaggtagctgtacggaaacctgcagcccgagctgtaccccg

SEQ ID NO: 83 - DNA, 42 bp, Artificial Sequence
  Description of Artificial Sequence: Synthetic oligonucleotide
ggcgctccatgtggtgcaggttgcgcaggtccatgtggcccg

SEQ ID NO: 84 - DNA, 42 bp, Artificial Sequence
  Description of Artificial Sequence: Synthetic oligonucleotide
ggctctccaggtgcaggtagctgtacgtgcacctgtagcccg

SEQ ID NO: 85 - DNA, 36 bp, Artificial Sequence
  Description of Artificial Sequence: Synthetic oligonucleotide
ggctctccaggtgcaggtagctgttgctgtacggaa

SEQ ID NO: 86 - DNA, 66 bp, Artificial Sequence
  Description of Artificial Sequence: Synthetic oligonucleotide
ggctctccatgtggtgcaggtgagagcacgacctgcagcccgagcaccccgacctcctgtccggaa

SEQ ID NO: 87 - DNA, 42 bp, Artificial Sequence
  Description of Artificial Sequence: Synthetic oligonucleotide
ggctctccatgtggtgcaggttgcagcacgacctgtagcccg

SEQ ID NO: 88 - DNA, 432 bp, Artificial Sequence
  Description of Artificial Sequence: Synthetic polynucleotide
ggctctccaggtgcaggtagctgcgctggtagcccaacctctaccgaagaaggtacctctgaatccgcttgttccccagaaggtcctggtactagcactgagccaagcgaaggttcttgtggcccatccccggcaggtagccctacctctaccgaagagggcacttgcaccgaaccatctgagggttccgctcctggcacctccgaaccgacttgctccggcagtgctccgggtacttccgaaagcgcaactccggaatcctgcggtccttctgagcctgctacttccggctctgaaactccaggtagctgtgcgccaacttctggttctgaaactccaggttcaccggcgggtagctgcacgagcacggaggaaggtacctctgagtcggccactcctgagtcctgtggcccgacggaaagcgcctctggc

SEQ ID NO: 89 - DNA, 240 bp, Artificial Sequence
  Description of Artificial Sequence: Synthetic polynucleotide
ggctctccaggtgcaggtagctgtacggaaaccagcccgagcacctgcccgaccgagtccccggaagcgtgtggcagcggtagcggcagcccgtgcagcccgagcggtaccgaggcgtgtagcacgtccggctcggaaggttgctctccgtcctccacggcaccgtgtggcccgaccgaaaccgagggctgcacgaccagcagcggtccgccgtgtccggagagcgctacctccgagggt

SEQ ID NO: 90 - DNA, 126 bp, Artificial Sequence; identical to SEQ ID NO: 77
  Description of Artificial Sequence: Synthetic polynucleotide

SEQ ID NO: 91 - DNA, 126 bp, Artificial Sequence; identical to SEQ ID NO: 77
  Description of Artificial Sequence: Synthetic polynucleotide

SEQ ID NO: 92 - DNA, 126 bp, Artificial Sequence; identical to SEQ ID NO: 77
  Description of Artificial Sequence: Synthetic polynucleotide

SEQ ID NO: 93 - DNA, 126 bp, Artificial Sequence; identical to SEQ ID NO: 77
  Description of Artificial Sequence: Synthetic polynucleotide

SEQ ID NO: 94 - DNA, 42 bp, Artificial Sequence; identical to SEQ ID NO: 83
  Description of Artificial Sequence: Synthetic oligonucleotide

SEQ ID NO: 95 - DNA, 126 bp, Artificial Sequence; identical to SEQ ID NO: 77
  Description of Artificial Sequence: Synthetic polynucleotide

SEQ ID NO: 96 - DNA, 126 bp, Artificial Sequence; identical to SEQ ID NO: 77
  Description of Artificial Sequence: Synthetic polynucleotide

SEQ ID NO: 97 - protein, 16 aa, Artificial Sequence
  Description of Artificial Sequence: Synthetic peptide
LSGRSDNHSPLGLAGS

SEQ ID NO: 98 - protein, 16 aa, Artificial Sequence
  Description of Artificial Sequence: Synthetic peptide
SPLGLAGSLSGRSDNH

SEQ ID NO: 99 - protein, 12 aa, Artificial Sequence
  Description of Artificial Sequence: Synthetic peptide
SPLGLSGRSDNH

SEQ ID NO: 100 - protein, 16 aa, Artificial Sequence
  Description of Artificial Sequence: Synthetic peptide
LAGRSDNHSPLGLAGS

SEQ ID NO: 101 - protein, 16 aa, Artificial Sequence
  Description of Artificial Sequence: Synthetic peptide
LAGRSDNHVPLSLSMG

SEQ ID NO: 102 - protein, 16 aa, Artificial Sequence
  Description of Artificial Sequence: Synthetic peptide
LAGRSDNHEPLELVAG

SEQ ID NO: 103 - protein, 8 aa, Artificial Sequence
  Description of Artificial Sequence: Synthetic peptide
SPLGLAGS

SEQ ID NO: 104 - protein, 8 aa, Artificial Sequence
  Description of Artificial Sequence: Synthetic peptide
GPLGLARG

SEQ ID NO: 105 - protein, 8 aa, Artificial Sequence
  Description of Artificial Sequence: Synthetic peptide
LSGRSDNH

SEQ ID NO: 106 - protein, 8 aa, Artificial Sequence
  Description of Artificial Sequence: Synthetic peptide
GTAHLMGG

SEQ ID NO: 107 - protein, 8 aa, Artificial Sequence
  Description of Artificial Sequence: Synthetic peptide
RIGSLRTA

SEQ ID NO: 108 - protein, 8 aa, Artificial Sequence
  Description of Artificial Sequence: Synthetic peptide
RIGALRTA

SEQ ID NO: 109 - protein, 8 aa, Artificial Sequence
  Description of Artificial Sequence: Synthetic peptide
RIGWLRTA

SEQ ID NO: 110 - protein, 8 aa, Artificial Sequence
  Description of Artificial Sequence: Synthetic peptide
RIGNLRTA

SEQ ID NO: 111 - protein, 8 aa, Artificial Sequence
  Description of Artificial Sequence: Synthetic peptide
RIGFLRTA

SEQ ID NO: 112 - protein, 8 aa, Artificial Sequence
  Description of Artificial Sequence: Synthetic peptide
RIFFLRTA

SEQ ID NO: 113 - protein, 8 aa, Artificial Sequence
  Description of Artificial Sequence: Synthetic peptide
RILFLRTA

SEQ ID NO: 114 - protein, 8 aa, Artificial Sequence
  Description of Artificial Sequence: Synthetic peptide
RIYFLRTA

SEQ ID NO: 115 - protein, 8 aa, Artificial Sequence
  Description of Artificial Sequence: Synthetic peptide
RIQFLRTA

SEQ ID NO: 116 - protein, 8 aa, Artificial Sequence
  Description of Artificial Sequence: Synthetic peptide
EPAALMAG

SEQ ID NO: 117 - protein, 8 aa, Artificial Sequence
  Description of Artificial Sequence: Synthetic peptide
EPANLMAG

SEQ ID NO: 118 - protein, 8 aa, Artificial Sequence
  Description of Artificial Sequence: Synthetic peptide
EPASLMAG

SEQ ID NO: 119 - protein, 8 aa, Artificial Sequence
  Description of Artificial Sequence: Synthetic peptide
EPFHLMAG

SEQ ID NO: 120 - protein, 8 aa, Artificial Sequence
  Description of Artificial Sequence: Synthetic peptide
EPWHLMAG

SEQ ID NO: 121 - protein, 8 aa, Artificial Sequence
  Description of Artificial Sequence: Synthetic peptide
EPRHLMAG

SEQ ID NO: 122 - protein, 8 aa, Artificial Sequence
  Description of Artificial Sequence: Synthetic peptide
VPLSLFMG

SEQ ID NO: 123 - protein, 8 aa, Artificial Sequence
  Description of Artificial Sequence: Synthetic peptide
VPLSLHMG

SEQ ID NO: 124 - protein, 8 aa, Artificial Sequence
  Description of Artificial Sequence: Synthetic peptide
VPLSLQAG

SEQ ID NO: 125 - protein, 8 aa, Artificial Sequence
  Description of Artificial Sequence: Synthetic peptide
VPLSLTMG

SEQ ID NO: 126 - protein, 8 aa, Artificial Sequence
  Description of Artificial Sequence: Synthetic peptide
VPLSLKMG

SEQ ID NO: 127 - protein, 8 aa, Artificial Sequence
  Description of Artificial Sequence: Synthetic peptide
VPLSLSMG

SEQ ID NO: 128 - protein, 8 aa, Artificial Sequence
  Description of Artificial Sequence: Synthetic peptide
VPLSLNAG

SEQ ID NO: 129 - protein, 8 aa, Artificial Sequence
  Description of Artificial Sequence: Synthetic peptide
VPLSLLMG

SEQ ID NO: 130 - protein, 8 aa, Artificial Sequence
  Description of Artificial Sequence: Synthetic peptide
EPLELPAG

SEQ ID NO: 131 - protein, 8 aa, Artificial Sequence
  Description of Artificial Sequence: Synthetic peptide
EPLELAAG

SEQ ID NO: 132 - protein, 8 aa, Artificial Sequence
  Description of Artificial Sequence: Synthetic peptide
EPLELVAG

SEQ ID NO: 133 - protein, 8 aa, Artificial Sequence
  Description of Artificial Sequence: Synthetic peptide
EPLELSAG

SEQ ID NO: 134 - protein, 8 aa, Artificial Sequence
  Description of Artificial Sequence: Synthetic peptide
EPLELDAG

SEQ ID NO: 135 - protein, 8 aa, Artificial Sequence
  Description of Artificial Sequence: Synthetic peptide
EPLELQAG

SEQ ID NO: 136 - protein, 8 aa, Artificial Sequence
  Description of Artificial Sequence: Synthetic peptide
EPLELRAG

SEQ ID NO: 137 - protein, 8 aa, Artificial Sequence
  Description of Artificial Sequence: Synthetic peptide
EPLELKAG

SEQ ID NO: 138 - protein, 8 aa, Artificial Sequence
  Description of Artificial Sequence: Synthetic peptide
EPLELIAG

SEQ ID NO: 139 - protein, 8 aa, Artificial Sequence
  Description of Artificial Sequence: Synthetic peptide
LGPVSGVP

SEQ ID NO: 140 - protein, 8 aa, Artificial Sequence
  Description of Artificial Sequence: Synthetic peptide
VAGDSLEE

SEQ ID NO: 141 - protein, 8 aa, Artificial Sequence
  Description of Artificial Sequence: Synthetic peptide
GPAGLGGA

SEQ ID NO: 142 - protein, 8 aa, Artificial Sequence
  Description of Artificial Sequence: Synthetic peptide
GPAGLRGA

SEQ ID NO: 143 - protein, 8 aa, Artificial Sequence
  Description of Artificial Sequence: Synthetic peptide
APLGLRLR

SEQ ID NO: 144 - protein, 8 aa, Artificial Sequence
  Description of Artificial Sequence: Synthetic peptide
PALPLVAQ

SEQ ID NO: 145 - protein, 7 aa, Artificial Sequence
  Description of Artificial Sequence: Synthetic peptide
ENLYFQG

SEQ ID NO: 146 - protein, 8 aa, Artificial Sequence
  Description of Artificial Sequence: Synthetic peptide
DDDKIVGG

SEQ ID NO: 147 - protein, 8 aa, Artificial Sequence
  Description of Artificial Sequence: Synthetic peptide
LEVLFQGP

SEQ ID NO: 148 - protein, 8 aa, Artificial Sequence
  Description of Artificial Sequence: Synthetic peptide
LPKTGSES

SEQ ID NO: 149 - protein, 5 aa, Artificial Sequence
  Description of Artificial Sequence: Synthetic peptide
SGRSA

SEQ ID NO: 150 - protein, 5 aa, Artificial Sequence
  Description of Artificial Sequence: Synthetic peptide
YGRSA

SEQ ID NO: 151 - protein, 6 aa, Artificial Sequence
  Description of Artificial Sequence: Synthetic peptide
SSYYSG

SEQ ID NO: 152 - protein, 8 aa, Artificial Sequence
  Description of Artificial Sequence: Synthetic peptide
RRARVVGG

SEQ ID NO: 153 - protein, 8 aa, Artificial Sequence
  Description of Artificial Sequence: Synthetic peptide
RQLRVVGG

SEQ ID NO: 154 - protein, 8 aa, Artificial Sequence
  Description of Artificial Sequence: Synthetic peptide
RRARVVGG

SEQ ID NO: 155 - protein, 8 aa, Artificial Sequence
  Description of Artificial Sequence: Synthetic peptide
RQARVVGG

SEQ ID NO: 156 - protein, 4 aa, Artificial Sequence
  Description of Artificial Sequence: Synthetic peptide
GFFY

SEQ ID NO: 157 - protein, 6 aa, Artificial Sequence
  Description of Artificial Sequence: Synthetic peptide
  MOD_RES (4)..(4): Hof
  MOD_RES (5)..(5): Orn
PLGXXL

SEQ ID NO: 158 - protein, 7 aa, Artificial Sequence
  Description of Artificial Sequence: Synthetic peptide
  MOD_RES (3)..(3): Cit
  MOD_RES (5)..(5): Hof
EPXFXYL

SEQ ID NO: 159 - protein, 7 aa, Artificial Sequence
  Description of Artificial Sequence: Synthetic peptide
PQGIAGQ

SEQ ID NO: 160 - protein, 6 aa, Artificial Sequence
  Description of Artificial Sequence: Synthetic peptide
  MOD_RES (5)..(5): Mel
PQGIXG

SEQ ID NO: 161 - protein, 6 aa, Artificial Sequence
  Description of Artificial Sequence: Synthetic peptide
  MOD_RES (5)..(5): Nva
AALGXP

SEQ ID NO: 162 - protein, 9 aa, Artificial Sequence
  Description of Artificial Sequence: Synthetic peptide
GPQGIAGQR

SEQ ID NO: 163 - protein, 10 aa, Artificial Sequence
  Description of Artificial Sequence: Synthetic peptide
SGKIPRTATA

SEQ ID NO: 164 - protein, 10 aa, Artificial Sequence
  Description of Artificial Sequence: Synthetic peptide
SGPLFYSVTA

SEQ ID NO: 165 - protein, 6 aa, Artificial Sequence
  Description of Artificial Sequence: Synthetic peptide
PLRLSW

SEQ ID NO: 166 - protein, 9 aa, Artificial Sequence
  Description of Artificial Sequence: Synthetic peptide
GKGPRQITA

SEQ ID NO: 167 - protein, 9 aa, Artificial Sequence
  Description of Artificial Sequence: Synthetic peptide
SGRRLIHHT

SEQ ID NO: 168 - protein, 10 aa, Artificial Sequence
  Description of Artificial Sequence: Synthetic peptide
SGQPHYLTTA

SEQ ID NO: 169 - protein, 7 aa, Artificial Sequence
  Description of Artificial Sequence: Synthetic peptide
SGLKALM

SEQ ID NO: 170 - protein, 10 aa, Artificial Sequence
  Description of Artificial Sequence: Synthetic peptide
SGFGSRYLTA

SEQ ID NO: 171 - protein, 10 aa, Artificial Sequence
  Description of Artificial Sequence: Synthetic peptide
SGLRPAKSTA

SEQ ID NO: 172 - protein, 7 aa, Artificial Sequence
  Description of Artificial Sequence: Synthetic peptide
LGPSTST

SEQ ID NO: 173 - protein, 5 aa, Artificial Sequence
  Description of Artificial Sequence: Synthetic peptide
PQGVR

SEQ ID NO: 174 - protein, 5 aa, Artificial Sequence
  Description of Artificial Sequence: Synthetic peptide
PSGLP

SEQ ID NO: 175 - protein, 5 aa, Artificial Sequence
  Description of Artificial Sequence: Synthetic peptide
PAGVQ

SEQ ID NO: 176 - protein, 5 aa, Artificial Sequence
  Description of Artificial Sequence: Synthetic peptide
PSGRD

SEQ ID NO: 177 - protein, 5 aa, Artificial Sequence
  Description of Artificial Sequence: Synthetic peptide
PPGIV

SEQ ID NO: 178 - protein, 5 aa, Artificial Sequence
  Description of Artificial Sequence: Synthetic peptide
PENFF

SEQ ID NO: 179 - protein, 5 aa, Artificial Sequence
  Description of Artificial Sequence: Synthetic peptide
PLKLM

SEQ ID NO: 180 - protein, 5 aa, Artificial Sequence
  Description of Artificial Sequence: Synthetic peptide
PGAYH

SEQ ID NO: 181 - protein, 5 aa, Artificial Sequence
  Description of Artificial Sequence: Synthetic peptide
AIHIQ

SEQ ID NO: 182 - protein, 5 aa, Artificial Sequence
  Description of Artificial Sequence: Synthetic peptide
HFFKN

SEQ ID NO: 183 - protein, 5 aa, Artificial Sequence
  Description of Artificial Sequence: Synthetic peptide
GLSLS

SEQ ID NO: 184 - protein, 5 aa, Artificial Sequence
  Description of Artificial Sequence: Synthetic peptide
ASDYK

SEQ ID NO: 185 - protein, 8 aa, Artificial Sequence
  Description of Artificial Sequence: Synthetic peptide
GPLGMLSQ

SEQ ID NO: 186 - protein, 5 aa, Artificial Sequence
  Description of Artificial Sequence: Synthetic peptide
CGLDD

SEQ ID NO: 187 - protein, 8 aa, Artificial Sequence
  Description of Artificial Sequence: Synthetic peptide
GPQGIWGQ

SEQ ID NO: 188 - protein, 8 aa, Artificial Sequence
  Description of Artificial Sequence: Synthetic peptide
RPLALWRS

SEQ ID NO: 189 - protein, 8 aa, Artificial Sequence
  Description of Artificial Sequence: Synthetic peptide
GPLGLARK

SEQ ID NO: 190 - protein, 7 aa, Artificial Sequence
  Description of Artificial Sequence: Synthetic peptide
GKAFRRL

SEQ ID NO: 191 - protein, 8 aa, Artificial Sequence
  Description of Artificial Sequence: Synthetic peptide
RPSASRSA

SEQ ID NO: 192 - protein, 7 aa, Artificial Sequence
  Description of Artificial Sequence: Synthetic peptide
  MOD_RES (5)..(5): Dpa
PLGLXAR

SEQ ID NO: 193 - protein, 6 aa, Artificial Sequence
  Description of Artificial Sequence: Synthetic peptide
  MOD_RES (2)..(2): Cha
  MOD_RES (4)..(4): Smc
PXGXHA

SEQ ID NO: 194 - protein, 7 aa, Artificial Sequence
  Description of Artificial Sequence: Synthetic peptide
  MOD_RES (2)..(2): Cha
  MOD_RES (4)..(4): Nva
  MOD_RES (7)..(7): D-Phe
PXGXHAF

SEQ ID NO: 195 - protein, 8 aa, Artificial Sequence
  Description of Artificial Sequence: Synthetic peptide
PTASALKG

SEQ ID NO: 196 - protein, 9 aa, Artificial Sequence
  Description of Artificial Sequence: Synthetic peptide
PRPAAVKGT

SEQ ID NO: 197 - protein, 4 aa, Artificial Sequence
  Description of Artificial Sequence: Synthetic peptide
AAPV

SEQ ID NO: 198 - protein, 8 aa, Artificial Sequence
  Description of Artificial Sequence: Synthetic peptide
GPICFRLG

SEQ ID NO: 199 - protein, 4 aa, Artificial Sequence
  Description of Artificial Sequence: Synthetic peptide
AANL

SEQ ID NO: 200 - protein, 5 aa, Artificial Sequence
  Description of Artificial Sequence: Synthetic peptide
FSPFR

SEQ ID NO: 201 - protein, 5 aa, Artificial Sequence
  Description of Artificial Sequence: Synthetic peptide
EEEAY

SEQ ID NO: 202 - protein, 4 aa, Artificial Sequence
  Description of Artificial Sequence: Synthetic peptide
  MOD_RES (1)..(1): Beta-Ala
AIAL

SEQ ID NO: 203 - protein, 8 aa, Artificial Sequence
  Description of Artificial Sequence: Synthetic peptide
EVQRKTGT

SEQ ID NO: 204 - protein, 13 aa, Artificial Sequence
  Description of Artificial Sequence: Synthetic peptide
DVQEFRGVTAVIR

SEQ ID NO: 205 - protein, 13 aa, Artificial Sequence
  Description of Artificial Sequence: Synthetic peptide
HNEFRQRETYMVF

SEQ ID NO: 206 - protein, 8 aa, Artificial Sequence
  Description of Artificial Sequence: Synthetic peptide
KEEEGLGS

SEQ ID NO: 207 - protein, 8 aa, Artificial Sequence
  Description of Artificial Sequence: Synthetic peptide
GELEGRGT

SEQ ID NO: 208 - protein, 10 aa, Artificial Sequence
  Description of Artificial Sequence: Synthetic peptide
NITEGEARGS

SEQ ID NO: 209 - protein, 8 aa, Artificial Sequence
  Description of Artificial Sequence: Synthetic peptide
TAQEAGEG

SEQ ID NO: 210 - protein, 8 aa, Artificial Sequence
  Description of Artificial Sequence: Synthetic peptide
VSQELGQR

SEQ ID NO: 211 - protein, 8 aa, Artificial Sequence
  Description of Artificial Sequence: Synthetic peptide
PTAQEAGE

SEQ ID NO: 212 - protein, 8 aa, Artificial Sequence
  Description of Artificial Sequence: Synthetic peptide
  MOD_RES (2)..(2): Pro or Ala
  MOD_RES (3)..(3): Any amino acid
  MOD_RES (6)..(6): Any amino acid
  MOD_RES (8)..(8): Any amino acid
GXXGLXGX

SEQ ID NO: 213 - protein, 8 aa, Artificial Sequence
  Description of Artificial Sequence: Synthetic peptide
  MOD_RES (3)..(3): Any amino acid
  MOD_RES (6)..(6): Any amino acid
  MOD_RES (7)..(7): Gly or Ala
  MOD_RES (8)..(8): Any amino acid
GPXGLXXX

SEQ ID NO: 214 - protein, 8 aa, Artificial Sequence
  Description of Artificial Sequence: Synthetic peptide
ENLYFQGS

SEQ ID NO: 215 - protein, 8 aa, Artificial Sequence
  Description of Artificial Sequence: Synthetic peptide
DDDKIVGG

SEQ ID NO: 216 - protein, 8 aa, Artificial Sequence
  Description of Artificial Sequence: Synthetic peptide
LEVLFQGP

SEQ ID NO: 217 - protein, 8 aa, Artificial Sequence
  Description of Artificial Sequence: Synthetic peptide
  MOD_RES (3)..(3): Lys, Glu, Ala or Asp
  MOD_RES (6)..(6): Any amino acid
  MOD_RES (7)..(7): Glu, Lys or Ser
LPXTGXXS

SEQ ID NO: 218 - protein, 6 aa, Artificial Sequence
  Description of Artificial Sequence: Synthetic peptide
SASRSA

SEQ ID NO: 219 - protein, 5 aa, Artificial Sequence
  Description of Artificial Sequence: Synthetic peptide
  MOD_RES (4)..(4): Ser, Arg, Lys or Ala
  MOD_RES (5)..(5): Ala, Gly, Ser, Val or Arg
SGRXX

SEQ ID NO: 220 - protein, 6 aa, Artificial Sequence
  Description of Artificial Sequence: Synthetic peptide
  MOD_RES (3)..(3): Phe or Tyr
SSXYSG

SEQ ID NO: 221 - protein, 8 aa, Artificial Sequence
  Description of Artificial Sequence: Synthetic peptide
  MOD_RES (2)..(2): Arg, Ala or Leu
  MOD_RES (3)..(3): Ala, Leu or Tyr
  MOD_RES (5)..(5): Ala or Val
RXXRXVGG

SEQ ID NO: 222 - protein, 8 aa, Artificial Sequence
  Description of Artificial Sequence: Synthetic peptide
  MOD_RES (2)..(2): Arg or Gln
  MOD_RES (3)..(3): Tyr or Leu
RXXRVVGG

SEQ ID NO: 223 - protein, 8 aa, Artificial Sequence
  Description of Artificial Sequence: Synthetic peptide
  MOD_RES (5)..(5): Ala or Val
RRARXVGG

SEQ ID NO: 224 - protein, 8 aa, Artificial Sequence
  Description of Artificial Sequence: Synthetic peptide
  MOD_RES (2)..(2): Gln or Arg
  MOD_RES (5)..(5): Ala, Val or Tyr
RXARXVGG

SEQ ID NO: 225 - protein, 6 aa, Artificial Sequence
  Description of Artificial Sequence: Synthetic peptide
  MOD_RES (6)..(6): Ile or Leu
SGRRLX

SEQ ID NO: 226 - protein, 5 aa, Artificial Sequence
  Description of Artificial Sequence: Synthetic peptide
  MOD_RES (5)..(5): Any hydrophobic L-amino acid or Pro
PSGLX

SEQ ID NO: 227 - protein, 8 aa, Artificial Sequence
  Description of Artificial Sequence: Synthetic peptide
  MOD_RES (4)..(4): Ala or Ser
  MOD_RES (6)..(6): Leu, Phe, Tyr or Gln
  MOD_RES (7)..(7): Lys, Arg, Thr or Ile
  MOD_RES (8)..(8): Gly, Ala or Ser
PTAXAXXX

SEQ ID NO: 228 - protein, 12 aa, Artificial Sequence
  Description of Artificial Sequence: Synthetic peptide
GSPAGSPTSTEE

SEQ ID NO: 229 - protein, 12 aa, Artificial Sequence
  Description of Artificial Sequence: Synthetic peptide
GSEPATSGSETP

SEQ ID NO: 230 - protein, 12 aa, Artificial Sequence
  Description of Artificial Sequence: Synthetic peptide
GTSESATPESGP

SEQ ID NO: 231 - protein, 12 aa, Artificial Sequence
  Description of Artificial Sequence: Synthetic peptide
GTSTEPSEGSAP

SEQ ID NO: 232 - protein, 12 aa, Artificial Sequence
  Description of Artificial Sequence: Synthetic peptide
GSTSESPSGTAP

SEQ ID NO: 233 - protein, 12 aa, Artificial Sequence
  Description of Artificial Sequence: Synthetic peptide
GTSTPESGSASP

SEQ ID NO: 234 - protein, 12 aa, Artificial Sequence
  Description of Artificial Sequence: Synthetic peptide
GTSPSGESSTAP

SEQ ID NO: 235 - protein, 12 aa, Artificial Sequence
  Description of Artificial Sequence: Synthetic peptide
GSTSSTAESPGP

SEQ ID NO: 236 - protein, 12 aa, Artificial Sequence
  Description of Artificial Sequence: Synthetic peptide
GTPGSGTASSSP

SEQ ID NO: 237 - protein, 12 aa, Artificial Sequence
  Description of Artificial Sequence: Synthetic peptide
GSSTPSGATGSP

SEQ ID NO: 238 - protein, 12 aa, Artificial Sequence
  Description of Artificial Sequence: Synthetic peptide
GSSPSASTGTGP

SEQ ID NO: 239 - protein, 12 aa, Artificial Sequence
  Description of Artificial Sequence: Synthetic peptide
GASPGTSSTGSP

SEQ ID NO: 240 - protein, 144 aa, Artificial Sequence
  Description of Artificial Sequence: Synthetic polypeptide
GSEPATSGSETPGTSESATPESGPGSEPATSGSETPGSPAGSPTSTEEGTSTEPSEGSAPGSEPATSGSETPGSEPATSGSETPGSEPATSGSETPGTSTEPSEGSAPGTSESATPESGPGSEPATSGSETPGTSTEPSEGSAP

SEQ ID NO: 241 - protein, 144 aa, Artificial Sequence
  Description of Artificial Sequence: Synthetic polypeptide
SPAGSPTSTEEGTSESATPESGPGTSTEPSEGSAPGSPAGSPTSTEEGTSTEPSEGSAPGTSTEPSEGSAPGTSESATPESGPGSEPATSGSETPGSEPATSGSETPGSPAGSPTSTEEGTSESATPESGPGTSTEPSEGSAPG

SEQ ID NO: 242 - protein, 144 aa, Artificial Sequence
  Description of Artificial Sequence: Synthetic polypeptide
TSTEPSEGSAPGSPAGSPTSTEEGTSTEPSEGSAPGTSTEPSEGSAPGTSESATPESGPGTSTEPSEGSAPGTSESATPESGPGSEPATSGSETPGTSTEPSEGSAPGTSTEPSEGSAPGTSESATPESGPGTSESATPESGPG

SEQ ID NO: 243 - protein, 144 aa, Artificial Sequence; identical to SEQ ID NO: 242
  Description of Artificial Sequence: Synthetic polypeptide

SEQ ID NO: 244 - protein, 144 aa, Artificial Sequence
  Description of Artificial Sequence: Synthetic polypeptide
SPAGSPTSTEEGTSESATPESGPGSEPATSGSETPGTSESATPESGPGTSTEPSEGSAPGTSTEPSEGSAPGTSTEPSEGSAPGTSTEPSEGSAPGTSTEPSEGSAPGTSTEPSEGSAPGSPAGSPTSTEEGTSTEPSEGSAPG

SEQ ID NO: 245 - protein, 144 aa, Artificial Sequence; identical to SEQ ID NO: 244
  Description of Artificial Sequence: Synthetic polypeptide

SEQ ID NO: 246 - protein, 144 aa, Artificial Sequence
  Description of Artificial Sequence: Synthetic polypeptide
TSESATPESGPGSEPATSGSETPGTSESATPESGPGSEPATSGSETPGTSESATPESGPGTSTEPSEGSAPGTSESATPESGPGSPAGSPTSTEEGSPAGSPTSTEEGSPAGSPTSTEEGTSESATPESGPGTSTEPSEGSAPG

SEQ ID NO: 247 - protein, 144 aa, Artificial Sequence; identical to SEQ ID NO: 246
  Description of Artificial Sequence: Synthetic polypeptide

SEQ ID NO: 248 - protein, 144 aa, Artificial Sequence
  Description of Artificial Sequence: Synthetic polypeptide
TSESATPESGPGSEPATSGSETPGTSESATPESGPGSEPATSGSETPGTSESATPESGPGTSTEPSEGSAPGSPAGSPTSTEEGTSESATPESGPGSEPATSGSETPGTSESATPESGPGSPAGSPTSTEEGSPAGSPTSTEEG

SEQ ID NO: 249 - protein, 144 aa, Artificial Sequence
  Description of Artificial Sequence: Synthetic polypeptide
TSTEPSEGSAPGTSESATPESGPGTSESATPESGPGTSESATPESGPGSEPATSGSETPGSEPATSGSETPGSPAGSPTSTEEGTSTEPSEGSAPGTSTEPSEGSAPGSEPATSGSETPGTSESATPESGPGTSTEPSEGSAPG

SEQ ID NO: 250 - protein, 144 aa, Artificial Sequence
  Description of Artificial Sequence: Synthetic polypeptide
GTSTPESGSASPGTSPSGESSTAPGTSPSGESSTAPGSTSSTAESPGPGSTSESPSGTAPGSTSSTAESPGPGTSPSGESSTAPGTSTPESGSASPGSTSSTAESPGPGTSPSGESSTAPGTSPSGESSTAPGTSPSGESSTAP

SEQ ID NO: 251 - protein, 144 aa, Artificial Sequence
  Description of Artificial Sequence: Synthetic polypeptide
SGTASSSPGSSTPSGATGSPGTPGSGTASSSPGSSTPSGATGSPGSSTPSGATGSPGSSPSASTGTGPGSSPSASTGTGPGASPGTSSTGSPGTPGSGTASSSPGSSTPSGATGSPGSSPSASTGTGPGSSPSASTGTGPGASP

SEQ ID NO: 252 - protein, 144 aa, Artificial Sequence
  Description of Artificial Sequence: Synthetic polypeptide
PGSSPSASTGTGPGSSPSASTGTGPGTPGSGTASSSPGSSTPSGATGSPGSSPSASTGTGPGASPGTSSTGSPGTPGSGTASSSPGSSTPSGATGSPGTPGSGTASSSPGASPGTSSTGSPGASPGTSSTGSPGTPGSGTASSS

SEQ ID NO: 253 - protein, 144 aa, Artificial Sequence
  Description of Artificial Sequence: Synthetic polypeptide
GASPGTSSTGSPGSSPSASTGTGPGSSPSASTGTGPGTPGSGTASSSPGSSTPSGATGSPGSSPSASTGTGPGASPGTSSTGSPGTPGSGTASSSPGSSTPSGATGSPGTPGSGTASSSPGASPGTSSTGSPGASPGTSSTGSP

SEQ ID NO: 254 - protein, 144 aa, Artificial Sequence
  Description of Artificial Sequence: Synthetic polypeptide
GTPGSGTASSSPGSSTPSGATGSPGASPGTSSTGSPGTPGSGTASSSPGSSTPSGATGSPGSSPSASTGTGPGSSPSASTGTGPGSSTPSGATGSPGSSTPSGATGSPGASPGTSSTGSPGASPGTSSTGSPGASPGTSSTGSP

SEQ ID NO: 255 - protein, 144 aa, Artificial Sequence
  Description of Artificial Sequence: Synthetic polypeptide
GTPGSGTASSSPGASPGTSSTGSPGASPGTSSTGSPGASPGTSSTGSPGSSPSASTGTGPGTPGSGTASSSPGASPGTSSTGSPGASPGTSSTGSPGASPGTSSTGSPGSSTPSGATGSPGSSTPSGATGSPGASPGTSSTGSP

SEQ ID NO: 256 - protein, 144 aa, Artificial Sequence
  Description of Artificial Sequence: Synthetic polypeptide
GSSPSASTGTGPGSSPSASTGTGPGASPGTSSTGSPGASPGTSSTGSPGSSTPSGATGSPGSSPSASTGTGPGASPGTSSTGSPGSSPSASTGTGPGTPGSGTASSSPGSSTPSGATGSPGSSTPSGATGSPGASPGTSSTGSP

SEQ ID NO: 257 - protein, 144 aa, Artificial Sequence
  Description of Artificial Sequence: Synthetic polypeptide
GTPGSGTASSSPGSSTPSGATGSPGSSTPSGATGSPGSSPSASTGTGPGSSPSASTGTGPGASPGTSSTGSPGTPGSGTASSSPGSSTPSGATGSPGSSPSASTGTGPGSSPSASTGTGPGASPGTSSTGSPGASPGTSSTGSP

SEQ ID NO: 258 - protein, 144 aa, Artificial Sequence
  Description of Artificial Sequence: Synthetic polypeptide
GTPGSGTASSSPGSSTPSGATGSPGSSPSASTGTGPGSSPSASTGTGPGASPGTSSTGSPGASPGTSSTGSPGSSTPSGATGSPGSSPSASTGTGPGASPGTSSTGSPGSSPSASTGTGPGTPGSGTASSSPGSSTPSGATGSP

SEQ ID NO: 259 - protein, 288 aa, Artificial Sequence
  Description of Artificial Sequence: Synthetic polypeptide
GTSESATPESGPGSEPATSGSETPGTSESATPESGPGSEPATSGSETPGTSESATPESGPGTSTEPSEGSAPGSPAGSPTSTEEGTSESATPESGPGSEPATSGSETPGTSESATPESGPGSPAGSPTSTEEGSPAGSPTSTEEGTSTEPSEGSAPGTSESATPESGPGTSESATPESGPGTSESATPESGPGSEPATSGSETPGSEPATSGSETPGSPAGSPTSTEEGTSTEPSEGSAPGTSTEPSEGSAPGSEPATSGSETPGTSESATPESGPGTSTEPSEGSAP

SEQ ID NO: 260 - protein, 288 aa, Artificial Sequence
  Description of Artificial Sequence: Synthetic polypeptide
GSPAGSPTSTEEGTSESATPESGPGSEPATSGSETPGTSESATPESGPGTSTEPSEGSAPGTSTEPSEGSAPGTSTEPSEGSAPGTSTEPSEGSAPGTSTEPSEGSAPGTSTEPSEGSAPGSPAGSPTSTEEGTSTEPSEGSAPGTSESATPESGPGSEPATSGSETPGTSESATPESGPGSEPATSGSETPGTSESATPESGPGTSTEPSEGSAPGTSESATPESGPGSPAGSPTSTEEGSPAGSPTSTEEGSPAGSPTSTEEGTSESATPESGPGTSTEPSEGSAP

SEQ ID NO: 261 - protein, 288 aa, Artificial Sequence
  Description of Artificial Sequence: Synthetic polypeptide
PGASPGTSSTGSPGASPGTSSTGSPGTPGSGTASSSPGSSTPSGATGSPGTPGSGTASSSPGSSTPSGATGSPGTPGSGTASSSPGSSTPSGATGSPGSSTPSGATGSPGSSPSASTGTGPGSSPSASTGTGPGASPGTSSTGSPGTPGSGTASSSPGSSTPSGATGSPGSSPSASTGTGPGSSPSASTGTGPGASPGTSSTGSPGASPGTSSTGSPGSSTPSGATGSPGSSPSASTGTGPGASPGTSSTGSPGSSPSASTGTGPGTPGSGTASSSPGSSTPSGATGS

SEQ ID NO: 262 - protein, 288 aa, Artificial Sequence
  Description of Artificial Sequence: Synthetic polypeptide
GSSPSASTGTGPGSSPSASTGTGPGTPGSGTASSSPGSSTPSGATGSPGSSPSASTGTGPGASPGTSSTGSPGTPGSGTASSSPGSSTPSGATGSPGTPGSGTASSSPGASPGTSSTGSPGASPGTSSTGSPGTPGSGTASSSPGSSTPSGATGSPGASPGTSSTGSPGTPGSGTASSSPGSSTPSGATGSPGSSPSASTGTGPGSSPSASTGTGPGSSTPSGATGSPGSSTPSGATGSPGASPGTSSTGSPGASPGTSSTGSPGASPGTSSTGSPGTPGSGTASSSP

SEQ ID NO: 263 - protein, 540 aa, Artificial Sequence
  Description of Artificial Sequence: Synthetic polypeptide
GSTSSTAESPGPGSTSSTAESPGPGSTSESPSGTAPGSTSSTAESPGPGSTSSTAESPGPGTSTPESGSASPGSTSESPSGTAPGTSPSGESSTAPGSTSESPSGTAPGSTSESPSGTAPGTSPSGESSTAPGSTSESPSGTAPGSTSESPSGTAPGTSPSGESSTAPGSTSESPSGTAPGSTSESPSGTAPGSTSESPSGTAPGTSTPESGSASPGSTSESPSGTAPGTSTPESGSASPGSTSSTAESPGPGSTSSTAESPGPGTSTPESGSASPGTSTPESGSASPGSTSESPSGTAPGTSTPESGSASPGTSTPESGSASPGSTSESPSGTAPGSTSESPSGTAPGSTSESPSGTAPGSTSSTAESPGPGTSTPESGSASPGTSTPESGSASPGSTSESPSGTAPGSTSESPSGTAPGTSTPESGSASPGSTSESPSGTAPGSTSESPSGTAPGTSTPESGSASPGTSPSGESSTAPGSTSSTAESPGPGTSPSGESSTAPGSTSSTAESPGPGTSTPESGSASPGSTSESPSGTAP

SEQ ID NO: 264 - protein, 576 aa, Artificial Sequence
  Description of Artificial Sequence: Synthetic polypeptide
GSPAGSPTSTEEGTSESATPESGPGTSTEPSEGSAPGSPAGSPTSTEEGTSTEPSEGSAPGTSTEPSEGSAPGTSESATPESGPGSEPATSGSETPGSEPATSGSETPGSPAGSPTSTEEGTSESATPESGPGTSTEPSEGSAPGTSTEPSEGSAPGSPAGSPTSTEEGTSTEPSEGSAPGTSTEPSEGSAPGTSESATPESGPGTSTEPSEGSAPGTSESATPESGPGSEPATSGSETPGTSTEPSEGSAPGTSTEPSEGSAPGTSESATPESGPGTSESATPESGPGSPAGSPTSTEEGTSESATPESGPGSEPATSGSETPGTSESATPESGPGTSTEPSEGSAPGTSTEPSEGSAPGTSTEPSEGSAPGTSTEPSEGSAPGTSTEPSEGSAPGTSTEPSEGSAPGSPAGSPTSTEEGTSTEPSEGSAPGTSESATPESGPGSEPATSGSETPGTSESATPESGPGSEPATSGSETPGTSESATPESGPGTSTEPSEGSAPGTSESATPESGPGSPAGSPTSTEEGSPAGSPTSTEEGSPAGSPTSTEEGTSESATPESGPGTSTEPSEGSAP

SEQ ID NO: 265 - protein, 576 aa, Artificial Sequence
  Description of Artificial Sequence: Synthetic polypeptide
GSTSSTAESPGPGSTSSTAESPGPGSTSESPSGTAPGSTSSTAESPGPGSTSSTAESPGPGTSTPESGSASPGSTSESPSGTAPGTSPSGESSTAPGSTSESPSGTAPGSTSESPSGTAPGTSPSGESSTAPGSTSESPSGTAPGSTSESPSGTAPGTSPSGESSTAPGSTSESPSGTAPGSTSESPSGTAPGSTSESPSGTAPGTSTPESGSASPGSTSESPSGTAPGTSTPESGSASPGSTSSTAESPGPGSTSSTAESPGPGTSTPESGSASPGTSTPESGSASPGSTSESPSGTAPGTSTPESGSASPGTSTPESGSASPGSTSESPSGTAPGSTSESPSGTAPGSTSESPSGTAPGSTSSTAESPGPGTSTPESGSASPGTSTPESGSASPGSTSESPSGTAPGSTSESPSGTAPGTSTPESGSASPGSTSESPSGTAPGSTSESPSGTAPGTSTPESGSASPGTSPSGESSTAPGSTSSTAESPGPGTSPSGESSTAPGSTSSTAESPGPGTSTPESGSASPGSTSESPSGTAPGSTSSTAESPGPGTSTPESGSASPGTSTPESGSASP

SEQ ID NO: 266 - protein, 576 aa, Artificial Sequence
  Description of Artificial Sequence: Synthetic polypeptide
PGTPGSGTASSSPGSSTPSGATGSPGSSPSASTGTGPGSSPSASTGTGPGSSTPSGATGSPGSSTPSGATGSPGASPGTSSTGSPGASPGTSSTGSPGASPGTSSTGSPGTPGSGTASSSPGASPGTSSTGSPGASPGTSSTGSPGASPGTSSTGSPGSSPSASTGTGPGTPGSGTASSSPGASPGTSSTGSPGASPGTSSTGSPGASPGTSSTGSPGSSTPSGATGSPGSSTPSGATGSPGASPGTSSTGSPGTPGSGTASSSPGSSTPSGATGSPGSSTPSGATGSPGSSTPSGATGSPGSSPSASTGTGPGASPGTSSTGSPGASPGTSSTGSPGTPGSGTASSSPGASPGTSSTGSPGASPGTSSTGSPGASPGTSSTGSPGASPGTSSTGSPGTPGSGTASSSPGSSTPSGATGSPGTPGSGTASSSPGSSTPSGATGSPGTPGSGTASSSPGSSTPSGATGSPGSSTPSGATGSPGSSPSASTGTGPGSSPSASTGTGPGASPGTSSTGSPGTPGSGTASSSPGSSTPSGATGSPGSSPSASTGTGPGSSPSASTGTGPGASPGTSSTGS

SEQ ID NO: 267 - protein, 625 aa, Artificial Sequence
  Description of Artificial Sequence: Synthetic polypeptide
MAEPAGSPTSTEEGTPGSGTASSSPGSSTPSGATGSPGASPGTSSTGSPGSPAGSPTSTEEGTSESATPESGPGTSTEPSEGSAPGSPAGSPTSTEEGTSTEPSEGSAPGTSTEPSEGSAPGTSESATPESGPGSEPATSGSETPGSEPATSGSETPGSPAGSPTSTEEGTSESATPESGPGTSTEPSEGSAPGTSTEPSEGSAPGSPAGSPTSTEEGTSTEPSEGSAPGTSTEPSEGSAPGTSESATPESGPGTSTEPSEGSAPGTSESATPESGPGSEPATSGSETPGTSTEPSEGSAPGTSTEPSEGSAPGTSESATPESGPGTSESATPESGPGSPAGSPTSTEEGTSESATPESGPGSEPATSGSETPGTSESATPESGPGTSTEPSEGSAPGTSTEPSEGSAPGTSTEPSEGSAPGTSTEPSEGSAPGTSTEPSEGSAPGTSTEPSEGSAPGSPAGSPTSTEEGTSTEPSEGSAPGTSESATPESGPGSEPATSGSETPGTSESATPESGPGSEPATSGSETPGTSESATPESGPGTSTEPSEGSAPGTSESATPESGPGSPAGSPTSTEEGSPAGSPTSTEEGSPAGSPTSTEEGTSESATPESGPGTSTEPSEGSAP

SEQ ID NO: 268 - protein, 864 aa, Artificial Sequence
  Description of Artificial Sequence: Synthetic polypeptide
GSPAGSPTSTEEGTSESATPESGPGTSTEPSEGSAPGSPAGSPTSTEEGTSTEPSEGSAPGTSTEPSEGSAPGTSESATPESGPGSEPATSGSETPGSEPATSGSETPGSPAGSPTSTEEGTSESATPESGPGTSTEPSEGSAPGTSTEPSEGSAPGSPAGSPTSTEEGTSTEPSEGSAPGTSTEPSEGSAPGTSESATPESGPGTSTEPSEGSAPGTSESATPESGPGSEPATSGSETPGTSTEPSEGSAPGTSTEPSEGSAPGTSESATPESGPGTSESATPESGPGSPAGSPTSTEEGTSESATPESGPGSEPATSGSETPGTSESATPESGPGTSTEPSEGSAPGTSTEPSEGSAPGTSTEPSEGSAPGTSTEPSEGSAPGTSTEPSEGSAPGTSTEPSEGSAPGSPAGSPTSTEEGTSTEPSEGSAPGTSESATPESGPGSEPATSGSETPGTSESATPESGPGSEPATSGSETPGTSESATPESGPGTSTEPSEGSAPGTSESATPESGPGSPAGSPTSTEEGSPAGSPTSTEEGSPAGSPTSTEEGTSESATPESGPGTSTEPSEGSAPGTSESATPESGPGSEPATSGSETPGTSESATPESGPGSEPATSGSETPGTSESATPESGPGTSTEPSEGSAPGSPAGSPTSTEEGTSESATPESGPGSEPATSGSETPGTSESATPESGPGSPAGSPTSTEEGSPAGSPTSTEEGTSTEPSEGSAPGTSESATPESGPGTSESATPESGPGTSESATPESGPGSEPATSGSETPGSEPATSGSETPGSPAGSPTSTEEGTSTEPSEGSAPGTSTEPSEGSAPGSEPATSGSETPGTSESATPESGPGTSTEPSEGSAP

SEQ ID NO: 269 - protein, 864 aa, Artificial Sequence
  Description of Artificial Sequence: Synthetic polypeptide
GSTSSTAESPGPGSTSSTAESPGPGSTSESPSGTAPGSTSSTAESPGPGSTSSTAESPGPGTSTPESGSASPGSTSESPSGTAPGTSPSGESSTAPGSTSESPSGTAPGSTSESPSGTAPGTSPSGESSTAPGSTSESPSGTAPGSTSESPSGTAPGTSPSGESSTAPGSTSESPSGTAPGSTSESPSGTAPGSTSESPSGTAPGTSTPESGSASPGSTSESPSGTAPGTSTPESGSASPGSTSSTAESPGPGSTSSTAESPGPGTSTPESGSASPGTSTPESGSASPGSTSESPSGTAPGTSTPESGSASPGTSTPESGSASPGSTSESPSGTAPGSTSESPSGTAPGSTSESPSGTAPGSTSSTAESPGPGTSTPESGSASPGTSTPESGSASPGSTSESPSGTAPGSTSESPSGTAPGTSTPESGSASPGSTSESPSGTAPGSTSESPSGTAPGTSTPESGSASPGTSPSGESSTAPGSTSSTAESPGPGTSPSGESSTAPGSTSSTAESPGPGTSTPESGSASPGSTSESPSGTAPGSTSSTAESPGPGTSTPESGSASPGTSTPESGSASPGSTSSTAESPGPGTSPSGESSTAPGTSTPESGSASPGSTSESPSGTAPGSTSESPSGTAPGTSTPESGSASPGTSPSGESSTAPGSTSSTAESPGPGTSPSGESSTAPGSTSSTAESPGPGSTSSTAESPGPGTSPSGESSTAPGSTSESPSGTAPGSTSESPSGTAPGTSTPESGSASPGSTSESPSGTAPGSTSESPSGTAPGTSTPESGSASPGSTSESPSGTAPGSTSESPSGTAPGSTSESPSGTAPGSTSSTAESPGPGTSPSGESSTAPGTSPSGESSTAP

SEQ ID NO: 270 - protein, 864 aa, Artificial Sequence
  Description of Artificial Sequence: Synthetic polypeptide
GASPGTSSTGSPGSSPSASTGTGPGSSPSASTGTGPGTPGSGTASSSPGSSTPSGATGSPGSSPSASTGTGPGASPGTSSTGSPGTPGSGTASSSPGSSTPSGATGSPGTPGSGTASSSPGASPGTSSTGSPGASPGTSSTGSPGTPGSGTASSSPGSSTPSGATGSPGASPGTSSTGSPGTPGSGTASSSPGSSTPSGATGSPGSSPSASTGTGPGSSPSASTGTGPGSSTPSGATGSPGSSTPSGATGSPGASPGTSSTGSPGASPGTSSTGSPGASPGTSSTGSPGTPGSGTASSSPGASPGTSSTGSPGASPGTSSTGSPGASPGTSSTGSPGSSPSASTGTGPGTPGSGTASSSPGASPGTSSTGSPGASPGTSSTGSPGASPGTSSTGSPGSSTPSGATGSPGSSTPSGATGSPGASPGTSSTGSPGTPGSGTASSSPGSSTPSGATGSPGSSTPSGATGSPGSSTPSGATGSPGSSPSASTGTGPGASPGTSSTGSPGASPGTSSTGSPGTPGSGTASSSPGASPGTSSTGSPGASPGTSSTGSPGASPGTSSTGSPGASPGTSSTGSPGTPGSGTASSSPGSSTPSGATGSPGTPGSGTASSSPGSSTPSGATGSPGTPGSGTASSSPGSSTPSGATGSPGSSTPSGATGSPGSSPSASTGTGPGSSPSASTGTGPGASPGTSSTGSPGTPGSGTASSSPGSSTPSGATGSPGSSPSASTGTGPGSSPSASTGTGPGASPGTSSTGSPGASPGTSSTGSPGSSTPSGATGSPGSSPSASTGTGPGASPGTSSTGSPGSSPSASTGTGPGTPGSGTASSSPGSSTPSGATGSPGSSTPSGATGSPGASPGTSSTGSP

SEQ ID NO: 271 - protein, 108 aa, Artificial Sequence
  Description of Artificial Sequence: Synthetic polypeptide
TEEGTSESATPESGPGTSTEPSEGSAPGSPAGSPTSTEEGTSTEPSEGSAPGTSTEPSEGSAPGTSESATPESGPGSEPATSGSETPGSEPATSGSETPGSPAGSPTS

SEQ ID NO: 272 - protein, 108 aa, Artificial Sequence
  Description of Artificial Sequence: Synthetic polypeptide
GSPAGSPTSTEEGTSTEPSEGSAPGTSESATPESGPGTSESATPESGPGTSESATPESGPGSEPATSGSETPGSEPATSGSETPGSPAGSPTSTEEGTSTEPSEGSAP

SEQ ID NO: 273 - protein, 144 aa, Artificial Sequence
  Description of Artificial Sequence: Synthetic polypeptide
STEPSEGSAPGSPAGSPTSTEEGTSTEPSEGSAPGTSESATPESGPGSEPATSGSETPGTSESATPESGPGSEPATSGSETPGTSESATPESGPGTSTEPSEGSAPGTSESATPESGPGSPAGSPTSTEEGSPAGSPTSTEEGS

SEQ ID NO: 274 - protein, 144 aa, Artificial Sequence
  Description of Artificial Sequence: Synthetic polypeptide
SEPATSGSETPGTSESATPESGPGSEPATSGSETPGTSESATPESGPGTSTEPSEGSAPGSPAGSPTSTEEGTSESATPESGPGSEPATSGSETPGTSESATPESGPGSPAGSPTSTEEGSPAGSPTSTEEGTSTEPSEGSAPG

SEQ ID NO: 275 - protein, 180 aa, Artificial Sequence
  Description of Artificial Sequence: Synthetic polypeptide
TSTEEGTSESATPESGPGSEPATSGSETPGTSESATPESGPGSPAGSPTSTEEGSPAGSPTSTEEGTSTEPSEGSAPGTSESATPESGPGTSESATPESGPGTSESATPESGPGSEPATSGSETPGSEPATSGSETPGSPAGSPTSTEEGTSTEPSEGSAPGTSTEPSEGSAPGSEPATS

SEQ ID NO: 276 - protein, 216 aa, Artificial Sequence
  Description of Artificial Sequence: Synthetic polypeptide
PESGPGTSTEPSEGSAPGSPAGSPTSTEEGTSESATPESGPGSEPATSGSETPGTSESATPESGPGSPAGSPTSTEEGSPAGSPTSTEEGTSTEPSEGSAPGTSESATPESGPGTSESATPESGPGTSESATPESGPGSEPATSGSETPGSEPATSGSETPGSPAGSPTSTEEGTSTEPSEGSAPGTSTEPSEGSAPGSEPATSGSETPGTSESAT

SEQ ID NO: 277 - protein, 252 aa, Artificial Sequence
  Description of Artificial Sequence: Synthetic polypeptide
ESGPGSEPATSGSETPGTSESATPESGPGTSTEPSEGSAPGSPAGSPTSTEEGTSESATPESGPGSEPATSGSETPGTSESATPESGPGSPAGSPTSTEEGSPAGSPTSTEEGTSTEPSEGSAPGTSESATPESGPGTSESATPESGPGTSESATPESGPGSEPATSGSETPGSEPATSGSETPGSPAGSPTSTEEGTSTEPSEGSAPGTSTEPSEGSAPGSEPATSGSETPGTSESATPESGPGTSTEPSE

SEQ ID NO: 278 - protein, 288 aa, Artificial Sequence
  Description of Artificial Sequence: Synthetic polypeptide
TPESGPGTSTEPSEGSAPGTSESATPESGPGSEPATSGSETPGTSESATPESGPGSEPATSGSETPGTSESATPESGPGTSTEPSEGSAPGSPAGSPTSTEEGTSESATPESGPGSEPATSGSETPGTSESATPESGPGSPAGSPTSTEEGSPAGSPTSTEEGTSTEPSEGSAPGTSESATPESGPGTSESATPESGPGTSESATPESGPGSEPATSGSETPGSEPATSGSETPGSPAGSPTSTEEGTSTEPSEGSAPGTSTEPSEGSAPGSEPATSGSETPGTSESA

SEQ ID NO: 279 - protein, 324 aa, Artificial Sequence
  Description of Artificial Sequence: Synthetic polypeptide
PESGPGSPAGSPTSTEEGSPAGSPTSTEEGSPAGSPTSTEEGTSESATPESGPGTSTEPSEGSAPGTSESATPESGPGSEPATSGSETPGTSESATPESGPGSEPATSGSETPGTSESATPESGPGTSTEPSEGSAPGSPAGSPTSTEEGTSESATPESGPGSEPATSGSETPGTSESATPESGPGSPAGSPTSTEEGSPAGSPTSTEEGTSTEPSEGSAPGTSESATPESGPGTSESATPESGPGTSESATPESGPGSEPATSGSETPGSEPATSGSETPGSPAGSPTSTEEGTSTEPSEGSAPGTSTEPSEGSAPGSEPATS

SEQ ID NO: 280 - protein, 360 aa, Artificial Sequence
  Description of Artificial Sequence: Synthetic polypeptide
PESGPGTSTEPSEGSAPGTSESATPESGPGSPAGSPTSTEEGSPAGSPTSTEEGSPAGSPTSTEEGTSESATPESGPGTSTEPSEGSAPGTSESATPESGPGSEPATSGSETPGTSESATPESGPGSEPATSGSETPGTSESATPESGPGTSTEPSEGSAPGSPAGSPTSTEEGTSESATPESGPGSEPATSGSETPGTSESATPESGPGSPAGSPTSTEEGSPAGSPTSTEEGTSTEPSEGSAPGTSESATPESGPGTSESATPESGPGTSESATPESGPGSEPATSGSETPGSEPATSGSETPGSPAGSPTSTEEGTSTEPSEGSAPGTSTEPSEGSAPGSEPATSGSETPGTSESAT

SEQ ID NO: 281 - protein, 360 aa, Artificial Sequence
  Description of Artificial Sequence: Synthetic polypeptide
PESGPGSEPATSGSETPGTSESATPESGPGTSTEPSEGSAPGTSESATPESGPGSPAGSPTSTEEGSPAGSPTSTEEGSPAGSPTSTEEGTSESATPESGPGTSTEPSEGSAPGTSESATPESGPGSEPATSGSETPGTSESATPESGPGSEPATSGSETPGTSESATPESGPGTSTEPSEGSAPGSPAGSPTSTEEGTSESATPESGPGSEPATSGSETPGTSESATPESGPGSPAGSPTSTEEGSPAGSPTSTEEGTSTEPSEGSAPGTSESATPESGPGTSESATPESGPGTSESATPESGPGSEPATSGSETPGSEPATSGSETPGSPAGSPTSTEEGTSTEPSEGSAPGTSTEPS

SEQ ID NO: 282 - protein, 432 aa, Artificial Sequence
  Description of Artificial Sequence: Synthetic polypeptide
EGSAPGSPAGSPTSTEEGTSTEPSEGSAPGTSESATPESGPGSEPATSGSETPGTSESATPESGPGSEPATSGSETPGTSESATPESGPGTSTEPSEGSAPGTSESATPESGPGSPAGSPTSTEEGSPAGSPTSTEEGSPAGSPTSTEEGTSESATPESGPGTSTEPSEGSAPGTSESATPESGPGSEPATSGSETPGTSESATPESGPGSEPATSGSETPGTSESATPESGPGTSTEPSEGSAPGSPAGSPTSTEEGTSESATPESGPGSEPATSGSETPGTSESATPESGPGSPAGSPTSTEEGSPAGSPTSTEEGTSTEPSEGSAPGTSESATPESGPGTSESATPESGPGTSESATPESGPGSEPATSGSETPGSEPATSGSETPGSPAGSPTSTEEGTSTEPSEGSAPGTSTEPSEGSAPGSEPATS

SEQ ID NO: 283 - protein, 468 aa, Artificial Sequence
  Description of Artificial Sequence: Synthetic polypeptide
EGSAPGTSTEPSEGSAPGTSTEPSEGSAPGSPAGSPTSTEEGTSTEPSEGSAPGTSESATPESGPGSEPATSGSETPGTSESATPESGPGSEPATSGSETPGTSESATPESGPGTSTEPSEGSAPGTSESATPESGPGSPAGSPTSTEEGSPAGSPTSTEEGSPAGSPTSTEEGTSESATPESGPGTSTEPSEGSAPGTSESATPESGPGSEPATSGSETPGTSESATPESGPGSEPATSGSETPGTSESATPESGPGTSTEPSEGSAPGSPAGSPTSTEEGTSESATPESGPGSEPATSGSETPGTSESATPESGPGSPAGSPTSTEEGSPAGSPTSTEEGTSTEPSEGSAPGTSESATPESGPGTSESATPESGPGTSESATPESGPGSEPATSGSETPGSEPATSGSETPGSPAGSPTSTEEGTSTEPSEGSAPGTSTEPSEGSAPGSEPATSGSETPGTSESAT

SEQ ID NO: 284 - protein, 504 aa, Artificial Sequence
  Description of Artificial Sequence: Synthetic polypeptide
EGSAPGTSTEPSEGSAPGTSTEPSEGSAPGTSTEPSEGSAPGTSTEPSEGSAPGSPAGSPTSTEEGTSTEPSEGSAPGTSESATPESGPGSEPATSGSETPGTSESATPESGPGSEPATSGSETPGTSESATPESGPGTSTEPSEGSAPGTSESATPESGPGSPAGSPTSTEEGSPAGSPTSTEEGSPAGSPTSTEEGTSESATPESGPGTSTEPSEGSAPGTSESATPESGPGSEPATSGSETPGTSESATPESGPGSEPATSGSETPGTSESATPESGPGTSTEPSEGSAPGSPAGSPTSTEEGTSESATPESGPGSEPATSGSETPGTSESATPESGPGSPAGSPTSTEEGSPAGSPTSTEEGTSTEPSEGSAPGTSESATPESGPGTSESATPESGPGTSESATPESGPGSEPATSGSETPGSEPATSGSETPGSPAGSPTSTEEGTSTEPSEGSAPGTSTEPSEGSAPGSEPATSGSETPGTSESATPESGPGTSTEPS

SEQ ID NO: 285 - protein, 540 aa, Artificial Sequence
  Description of Artificial Sequence: Synthetic polypeptide
TPESGPGSPAGSPTSTEEGTSESATPESGPGSEPATSGSETPGTSESATPESGPGTSTEPSEGSAPGTSTEPSEGSAPGTSTEPSEGSAPGTSTEPSEGSAPGTSTEPSEGSAPGTSTEPSEGSAPGSPAGSPTSTEEGTSTEPSEGSAPGTSESATPESGPGSEPATSGSETPGTSESATPESGPGSEPATSGSETPGTSESATPESGPGTSTEPSEGSAPGTSESATPESGPGSPAGSPTSTEEGSPAGSPTSTEEGSPAGSPTSTEEGTSESATPESGPGTSTEPSEGSAPGTSESATPESGPGSEPATSGSETPGTSESATPESGPGSEPATSGSETPGTSESATPESGPGTSTEPSEGSAPGSPAGSPTSTEEGTSESATPESGPGSEPATSGSETPGTSESATPESGPGSPAGSPTSTEEGSPAGSPTSTEEGTSTEPSEGSAPGTSESATPESGPGTSESATPESGPGTSESATPESGPGSEPATSGSETPGSEPATSGSETPGSPAGSPTSTEEGTSTEPSEGSAPGTSTEP

SEQ ID NO: 286 - protein, 576 aa, Artificial Sequence
  Description of Artificial Sequence: Synthetic polypeptide
TPESGPGTSESATPESGPGSPAGSPTSTEEGTSESATPESGPGSEPATSGSETPGTSESATPESGPGTSTEPSEGSAPGTSTEPSEGSAPGTSTEPSEGSAPGTSTEPSEGSAPGTSTEPSEGSAPGTSTEPSEGSAPGSPAGSPTSTEEGTSTEPSEGSAPGTSESATPESGPGSEPATSGSETPGTSESATPESGPGSEPATSGSETPGTSESATPESGPGTSTEPSEGSAPGTSESATPESGPGSPAGSPTSTEEGSPAGSPTSTEEGSPAGSPTSTEEGTSESATPESGPGTSTEPSEGSAPGTSESATPESGPGSEPATSGSETPGTSESATPESGPGSEPATSGSETPGTSESATPESGPGTSTEPSEGSAPGSPAGSPTSTEEGTSESATPESGPGSEPATSGSETPGTSESATPESGPGSPAGSPTSTEEGSPAGSPTSTEEGTSTEPSEGSAPGTSESATPESGPGTSESATPESGPGTSESATPESGPGSEPATSGSETPGSEPATSGSETPGSPAGSPTSTEEGTSTEPSEGSAPGTSTEPSEGSAPGSEPATSGSETPGTSESA

SEQ ID NO: 287 - protein, 612 aa, Artificial Sequence
  Description of Artificial Sequence: Synthetic polypeptide
GSETPGTSTEPSEGSAPGTSTEPSEGSAPGTSESATPESGPGTSESATPESGPGSPAGSPTSTEEGTSESATPESGPGSEPATSGSETPGTSESATPESGPGTSTEPSEGSAPGTSTEPSEGSAPGTSTEPSEGSAPGTSTEPSEGSAPGTSTEPSEGSAPGTSTEPSEGSAPGSPAGSPTSTEEGTSTEPSEGSAPGTSESATPESGPGSEPATSGSETPGTSESATPESGPGSEPATSGSETPGTSESATPESGPGTSTEPSEGSAPGTSESATPESGPGSPAGSPTSTEEGSPAGSPTSTEEGSPAGSPTSTEEGTSESATPESGPGTSTEPSEGSAPGTSESATPESGPGSEPATSGSETPGTSESATPESGPGSEPATSGSETPGTSESATPESGPGTSTEPSEGSAPGSPAGSPTSTEEGTSESATPESGPGSEPATSGSETPGTSESATPESGPGSPAGSPTSTEEGSPAGSPTSTEEGTSTEPSEGSAPGTSESATPESGPGTSESATPESGPGTSESATPESGPGSEPATSGSETPGSEPATSGSETPGSPAGSPTSTEEGTSTEPSEGSAPGTSTEPSEGSAPGSEPATSGSETPGTSESAT

SEQ ID NO: 288 - protein, 648 aa, Artificial Sequence
  Description of Artificial Sequence: Synthetic polypeptide
PESGPGTSTEPSEGSAPGTSESATPESGPGSEPATSGSETPGTSTEPSEGSAPGTSTEPSEGSAPGTSESATPESGPGTSESATPESGPGSPAGSPTSTEEGTSESATPESGPGSEPATSGSETPGTSESATPESGPGTSTEPSEGSAPGTSTEPSEGSAPGTSTEPSEGSAPGTSTEPSEGSAPGTSTEPSEGSAPGTSTEPSEGSAPGSPAGSPTSTEEGTSTEPSEGSAPGTSESATPESGPGSEPATSGSETPGTSESATPESGPGSEPATSGSETPGTSESATPESGPGTSTEPSEGSAPGTSESATPESGPGSPAGSPTSTEEGSPAGSPTSTEEGSPAGSPTSTEEGTSESATPESGPGTSTEPSEGSAPGTSESATPESGPGSEPATSGSETPGTSESATPESGPGSEPATSGSETPGTSESATPESGPGTSTEPSEGSAPGSPAGSPTSTEEGTSESATPESGPGSEPATSGSETPGTSESATPESGPGSPAGSPTSTEEGSPAGSPTSTEEGTSTEPSEGSAPGTSESATPESGPGTSESATPESGPGTSESATPESGPGSEPATSGSETPGSEPATSGSETPGSPAGSPTSTEEGTSTEPSEGSAPGTSTEPSEGSAPGSEPATSGSETPGTSESAT

SEQ ID NO: 289 - protein, 684 aa, Artificial Sequence
  Description of Artificial Sequence: Synthetic polypeptide
EGSAPGSPAGSPTSTEEGTSTEPSEGSAPGTSTEPSEGSAPGTSESATPESGPGTSTEPSEGSAPGTSESATPESGPGSEPATSGSETPGTSTEPSEGSAPGTSTEPSEGSAPGTSESATPESGPGTSESATPESGPGSPAGSPTSTEEGTSESATPESGPGSEPATSGSETPGTSESATPESGPGTSTEPSEGSAPGTSTEPSEGSAPGTSTEPSEGSAPGTSTEPSEGSAPGTSTEPSEGSAPGTSTEPSEGSAPGSPAGSPTSTEEGTSTEPSEGSAPGTSESATPESGPGSEPATSGSETPGTSESATPESGPGSEPATSGSETPGTSESATPESGPGTSTEPSEGSAPGTSESATPESGPGSPAGSPTSTEEGSPAGSPTSTEEGSPAGSPTSTEEGTSESATPESGPGTSTEPSEGSAPGTSESATPESGPGSEPATSGSETPGTSESATPESGPGSEPATSGSETPGTSESATPESGPGTSTEPSEGSAPGSPAGSPTSTEEGTSESATPESGPGSEPATSGSETPGTSESATPESGPGSPAGSPTSTEEGSPAGSPTSTEEGTSTEPSEGSAPGTSESATPESGPGTSESATPESGPGTSESATPESGPGSEPATSGSETPGSEPATSGSETPGSPAGSPTSTEEGTSTEPSEGSAPGTSTEPSEGSAPGSEPATS

SEQ ID NO: 290 - protein, 720 aa, Artificial Sequence
  Description of Artificial Sequence: Synthetic polypeptide
TSGSETPGSEPATSGSETPGSPAGSPTSTEEGTSESATPESGPGTSTEPSEGSAPGTSTEPSEGSAPGSPAGSPTSTEEGTSTEPSEGSAPGTSTEPSEGSAPGTSESATPESGPGTSTEPSEGSAPGTSESATPESGPGSEPATSGSETPGTSTEPSEGSAPGTSTEPSEGSAPGTSESATPESGPGTSESATPESGPGSPAGSPTSTEEGTSESATPESGPGSEPATSGSETPGTSESATPESGPGTSTEPSEGSAPGTSTEPSEGSAPGTSTEPSEGSAPGTSTEPSEGSAPGTSTEPSEGSAPGTSTEPSEGSAPGSPAGSPTSTEEGTSTEPSEGSAPGTSESATPESGPGSEPATSGSETPGTSESATPESGPGSEPATSGSETPGTSESATPESGPGTSTEPSEGSAPGTSESATPESGPGSPAGSPTSTEEGSPAGSPTSTEEGSPAGSPTSTEEGTSESATPESGPGTSTEPSEGSAPGTSESATPESGPGSEPATSGSETPGTSESATPESGPGSEPATSGSETPGTSESATPESGPGTSTEPSEGSAPGSPAGSPTSTEEGTSESATPESGPGSEPATSGSETPGTSESATPESGPGSPAGSPTSTEEGSPAGSPTSTEEGTSTEPSEGSAPGTSESATPESGPGTSESATPESGPGTSESATPESGPGSEPATSGSETPGSEPATSGSETPGSPAGSPTSTEEGTSTE

SEQ ID NO: 291 - protein, 756 aa, Artificial Sequence
  Description of Artificial Sequence: Synthetic polypeptide
TSGSETPGSEPATSGSETPGSPAGSPTSTEEGTSESATPESGPGTSTEPSEGSAPGTSTEPSEGSAPGSPAGSPTSTEEGTSTEPSEGSAPGTSTEPSEGSAPGTSESATPESGPGTSTEPSEGSAPGTSESATPESGPGSEPATSGSETPGTSTEPSEGSAPGTSTEPSEGSAPGTSESATPESGPGTSESATPESGPGSPAGSPTSTEEGTSESATPESGPGSEPATSGSETPGTSESATPESGPGTSTEPSEGSAPGTSTEPSEGSAPGTSTEPSEGSAPGTSTEPSEGSAPGTSTEPSEGSAPGTSTEPSEGSAPGSPAGSPTSTEEGTSTEPSEGSAPGTSESATPESGPGSEPATSGSETPGTSESATPESGPGSEPATSGSETPGTSESATPESGPGTSTEPSEGSAPGTSESATPESGPGSPAGSPTSTEEGSPAGSPTSTEEGSPAGSPTSTEEGTSESATPESGPGTSTEPSEGSAPGTSESATPESGPGSEPATSGSETPGTSESATPESGPGSEPATSGSETPGTSESATPESGPGTSTEPSEGSAPGSPAGSPTSTEEGTSESATPESGPGSEPATSGSETPGTSESATPESGPGSPAGSPTSTEEGSPAGSPTSTEEGTSTEPSEGSAPGTSESATPESGPGTSESATPESGPGTSESATPESGPGSEPATSGSETPGSEPATSGSETPGSPAGSPTSTEEGTSTEPSEGSAPGTSTEPSEGSAPGSEPATSGSETPGTSES

SEQ ID NO: 292 - protein, 792 aa, Artificial Sequence
  Description of Artificial Sequence: Synthetic polypeptide
EGSAPGTSESATPESGPGSEPATSGSETPGSEPATSGSETPGSPAGSPTSTEEGTSESATPESGPGTSTEPSEGSAPGTSTEPSEGSAPGSPAGSPTSTEEGTSTEPSEGSAPGTSTEPSEGSAPGTSESATPESGPGTSTEPSEGSAPGTSESATPESGPGSEPATSGSETPGTSTEPSEGSAPGTSTEPSEGSAPGTSESATPESGPGTSESATPESGPGSPAGSPTSTEEGTSESATPESGPGSEPATSGSETPGTSESATPESGPGTSTEPSEGSAPGTSTEPSEGSAPGTSTEPSEGSAPGTSTEPSEGSAPGTSTEPSEGSAPGTSTEPSEGSAPGSPAGSPTSTEEGTSTEPSEGSAPGTSESATPESGPGSEPATSGSETPGTSESATPESGPGSEPATSGSETPGTSESATPESGPGTSTEPSEGSAPGTSESATPESGPGSPAGSPTSTEEGSPAGSPTSTEEGSPAGSPTSTEEGTSESATPESGPGTSTEPSEGSAPGTSESATPESGPGSEPATSGSETPGTSESATPESGPGSEPATSGSETPGTSESATPESGPGTSTEPSEGSAPGSPAGSPTSTEEGTSESATPESGPGSEPATSGSETPGTSESATPESGPGSPAGSPTSTEEGSPAGSPTSTEEGTSTEPSEGSAPGTSESATPESGPGTSESATPESGPGTSESATPESGPGSEPATSGSETPGSEPATSGSETPGSPAGSPTSTEEGTSTEPSEGSAPGTSTEPSEGSAPGSEPATSGSETPGTSESATPESGPGTSTEPS

SEQ ID NO: 293 - protein, 828 aa, Artificial Sequence
  Description of Artificial Sequence: Synthetic polypeptide
PESGPGTSTEPSEGSAPGSPAGSPTSTEEGTSTEPSEGSAPGTSTEPSEGSAPGTSESATPESGPGSEPATSGSETPGSEPATSGSETPGSPAGSPTSTEEGTSESATPESGPGTSTEPSEGSAPGTSTEPSEGSAPGSPAGSPTSTEEGTSTEPSEGSAPGTSTEPSEGSAPGTSESATPESGPGTSTEPSEGSAPGTSESATPESGPGSEPATSGSETPGTSTEPSEGSAPGTSTEPSEGSAPGTSESATPESGPGTSESATPESGPGSPAGSPTSTEEGTSESATPESGPGSEPATSGSETPGTSESATPESGPGTSTEPSEGSAPGTSTEPSEGSAPGTSTEPSEGSAPGTSTEPSEGSAPGTSTEPSEGSAPGTSTEPSEGSAPGSPAGSPTSTEEGTSTEPSEGSAPGTSESATPESGPGSEPATSGSETPGTSESATPESGPGSEPATSGSETPGTSESATPESGPGTSTEPSEGSAPGTSESATPESGPGSPAGSPTSTEEGSPAGSPTSTEEGSPAGSPTSTEEGTSESATPESGPGTSTEPSEGSAPGTSESATPESGPGSEPATSGSETPGTSESATPESGPGSEPATSGSETPGTSESATPESGPGTSTEPSEGSAPGSPAGSPTSTEEGTSESATPESGPGSEPATSGSETPGTSESATPESGPGSPAGSPTSTEEGSPAGSPTSTEEGTSTEPSEGSAPGTSESATPESGPGTSESATPESGPGTSESATPESGPGSEPATSGSETPGSEPATSGSETPGSPAGSPTSTEEGTSTEPSEGSAPGTSTEPSEGSAPGSEPATSGSETPGTSESAT

SEQ ID NO: 294 - protein, 108 aa, Artificial Sequence
  Description of Artificial Sequence: Synthetic polypeptide
SASTGTGPGSSPSASTGTGPGTPGSGTASSSPGSSTPSGATGSPGSSPSASTGTGPGASPGTSSTGSPGTPGSGTASSSPGSSTPSGATGSPGTPGSGTASSSPGASP

SEQ ID NO: 295 - protein, 108 aa, Artificial Sequence
  Description of Artificial Sequence: Synthetic polypeptide
PGTPGSGTASSSPGSSTPSGATGSPGTPGSGTASSSPGSSTPSGATGSPGSSTPSGATGSPGSSPSASTGTGPGSSPSASTGTGPGASPGTSSTGSPGTPGSGTASSS

SEQ ID NO: 296 - protein, 144 aa, Artificial Sequence; identical to SEQ ID NO: 252
  Description of Artificial Sequence: Synthetic polypeptide

SEQ ID NO: 297 - protein, 144 aa, Artificial Sequence
  Description of Artificial Sequence: Synthetic polypeptide
PSGATGSPGTPGSGTASSSPGSSTPSGATGSPGSSTPSGATGSPGSSPSASTGTGPGSSPSASTGTGPGASPGTSSTGSPGTPGSGTASSSPGSSTPSGATGSPGSSPSASTGTGPGSSPSASTGTGPGASPGTSSTGSPGASP

SEQ ID NO: 298 - protein, 180 aa, Artificial Sequence
  Description of Artificial Sequence: Synthetic polypeptide
TSSTGSPGSSPSASTGTGPGSSPSASTGTGPGTPGSGTASSSPGSSTPSGATGSPGSSPSASTGTGPGASPGTSSTGSPGTPGSGTASSSPGSSTPSGATGSPGTPGSGTASSSPGASPGTSSTGSPGASPGTSSTGSPGTPGSGTASSSPGSSTPSGATGSPGASPGTSSTGSPGTPGS

SEQ ID NO: 299 - protein, 216 aa, Artificial Sequence
  Description of Artificial Sequence: Synthetic polypeptide
TGTGPGSSPSASTGTGPGTPGSGTASSSPGSSTPSGATGSPGSSPSASTGTGPGASPGTSSTGSPGTPGSGTASSSPGSSTPSGATGSPGTPGSGTASSSPGASPGTSSTGSPGASPGTSSTGSPGTPGSGTASSSPGSSTPSGATGSPGASPGTSSTGSPGTPGSGTASSSPGSSTPSGATGSPGSSPSASTGTGPGSSPSASTGTGPGSSTPSG

SEQ ID NO: 300 - protein, 252 aa, Artificial Sequence
  Description of Artificial Sequence: Synthetic polypeptide
TSSTGSPGSSPSASTGTGPGSSPSASTGTGPGTPGSGTASSSPGSSTPSGATGSPGSSPSASTGTGPGASPGTSSTGSPGTPGSGTASSSPGSSTPSGATGSPGTPGSGTASSSPGASPGTSSTGSPGASPGTSSTGSPGTPGSGTASSSPGSSTPSGATGSPGASPGTSSTGSPGTPGSGTASSSPGSSTPSGATGSPGSSPSASTGTGPGSSPSASTGTGPGSSTPSGATGSPGSSTPSGATGSPGASPG

SEQ ID NO: 301 - protein, 288 aa, Artificial Sequence
  Description of Artificial Sequence: Synthetic polypeptide
TSSTGSPGSSPSASTGTGPGSSPSASTGTGPGTPGSGTASSSPGSSTPSGATGSPGSSPSASTGTGPGASPGTSSTGSPGTPGSGTASSSPGSSTPSGATGSPGTPGSGTASSSPGASPGTSSTGSPGASPGTSSTGSPGTPGSGTASSSPGSSTPSGATGSPGASPGTSSTGSPGTPGSGTASSSPGSSTPSGATGSPGSSPSASTGTGPGSSPSASTGTGPGSSTPSGATGSPGSSTPSGATGSPGASPGTSSTGSPGASPGTSSTGSPGASPGTSSTGSPGTPGS

SEQ ID NO: 302 - protein, 324 aa, Artificial Sequence
  Description of Artificial Sequence: Synthetic polypeptide
TSSTGSPGTPGSGTASSSPGASPGTSSTGSPGASPGTSSTGSPGASPGTSSTGSPGASPGTSSTGSPGTPGSGTASSSPGSSTPSGATGSPGTPGSGTASSSPGSSTPSGATGSPGTPGSGTASSSPGSSTPSGATGSPGSSTPSGATGSPGSSPSASTGTGPGSSPSASTGTGPGASPGTSSTGSPGTPGSGTASSSPGSSTPSGATGSPGSSPSASTGTGPGSSPSASTGTGPGASPGTSSTGSPGASPGTSSTGSPGSSTPSGATGSPGSSPSASTGTGPGASPGTSSTGSPGSSPSASTGTGPGTPGSGTASSSPGSSTP

SEQ ID NO: 303 - protein, 360 aa, Artificial Sequence
  Description of Artificial Sequence: Synthetic polypeptide
TSSTGSPGASPGTSSTGSPGTPGSGTASSSPGASPGTSSTGSPGASPGTSSTGSPGASPGTSSTGSPGASPGTSSTGSPGTPGSGTASSSPGSSTPSGATGSPGTPGSGTASSSPGSSTPSGATGSPGTPGSGTASSSPGSSTPSGATGSPGSSTPSGATGSPGSSPSASTGTGPGSSPSASTGTGPGASPGTSSTGSPGTPGSGTASSSPGSSTPSGATGSPGSSPSASTGTGPGSSPSASTGTGPGASPGTSSTGSPGASPGTSSTGSPGSSTPSGATGSPGSSPSASTGTGPGASPGTSSTGSPGSSPSASTGTGPGTPGSGTASSSPGSSTPSGATGSPGSSTPSGATGSPGASPG

SEQ ID NO: 304 - protein, 396 aa, Artificial Sequence
  Description of Artificial Sequence: Synthetic polypeptide
GATGSPGSSTPSGATGSPGSSPSASTGTGPGASPGTSSTGSPGASPGTSSTGSPGTPGSGTASSSPGASPGTSSTGSPGASPGTSSTGSPGASPGTSSTGSPGASPGTSSTGSPGTPGSGTASSSPGSSTPSGATGSPGTPGSGTASSSPGSSTPSGATGSPGTPGSGTASSSPGSSTPSGATGSPGSSTPSGATGSPGSSPSASTGTGPGSSPSASTGTGPGASPGTSSTGSPGTPGSGTASSSPGSSTPSGATGSPGSSPSASTGTGPGSSPSASTGTGPGASPGTSSTGSPGASPGTSSTGSPGSSTPSGATGSPGSSPSASTGTGPGASPGTSSTGSPGSSPSASTGTGPGTPGSGTASSSPGSSTPSGATGSPGSSTPSGATGSPGASPGT

SEQ ID NO: 305 - protein, 432 aa, Artificial Sequence
  Description of Artificial Sequence: Synthetic polypeptide
GATGSPGSSTPSGATGSPGASPGTSSTGSPGTPGSGTASSSPGSSTPSGATGSPGSSTPSGATGSPGSSTPSGATGSPGSSPSASTGTGPGASPGTSSTGSPGASPGTSSTGSPGTPGSGTASSSPGASPGTSSTGSPGASPGTSSTGSPGASPGTSSTGSPGASPGTSSTGSPGTPGSGTASSSPGSSTPSGATGSPGTPGSGTASSSPGSSTPSGATGSPGTPGSGTASSSPGSSTPSGATGSPGSSTPSGATGSPGSSPSASTGTGPGSSPSASTGTGPGASPGTSSTGSPGTPGSGTASSSPGSSTPSGATGSPGSSPSASTGTGPGSSPSASTGTGPGASPGTSSTGSPGASPGTSSTGSPGSSTPSGATGSPGSSPSASTGTGPGASPGTSSTGSPGSSPSASTGTGPGTPGSGTASSSPGSSTPS

SEQ ID NO: 306 - protein, 468 aa, Artificial Sequence
  Description of Artificial Sequence: Synthetic polypeptide
TSSTGSPGSSPSASTGTGPGTPGSGTASSSPGASPGTSSTGSPGASPGTSSTGSPGASPGTSSTGSPGSSTPSGATGSPGSSTPSGATGSPGASPGTSSTGSPGTPGSGTASSSPGSSTPSGATGSPGSSTPSGATGSPGSSTPSGATGSPGSSPSASTGTGPGASPGTSSTGSPGASPGTSSTGSPGTPGSGTASSSPGASPGTSSTGSPGASPGTSSTGSPGASPGTSSTGSPGASPGTSSTGSPGTPGSGTASSSPGSSTPSGATGSPGTPGSGTASSSPGSSTPSGATGSPGTPGSGTASSSPGSSTPSGATGSPGSSTPSGATGSPGSSPSASTGTGPGSSPSASTGTGPGASPGTSSTGSPGTPGSGTASSSPGSSTPSGATGSPGSSPSASTGTGPGSSPSASTGTGPGASPGTSSTGSPGASPGTSSTGSPGSSTPSGATGSPGSSPSASTGTGPGASPG

SEQ ID NO: 307 - protein, 504 aa, Artificial Sequence
  Description of Artificial Sequence: Synthetic polypeptide
TSSTGSPGSSPSASTGTGPGTPGSGTASSSPGASPGTSSTGSPGASPGTSSTGSPGASPGTSSTGSPGSSTPSGATGSPGSSTPSGATGSPGASPGTSSTGSPGTPGSGTASSSPGSSTPSGATGSPGSSTPSGATGSPGSSTPSGATGSPGSSPSASTGTGPGASPGTSSTGSPGASPGTSSTGSPGTPGSGTASSSPGASPGTSSTGSPGASPGTSSTGSPGASPGTSSTGSPGASPGTSSTGSPGTPGSGTASSSPGSSTPSGATGSPGTPGSGTASSSPGSSTPSGATGSPGTPGSGTASSSPGSSTPSGATGSPGSSTPSGATGSPGSSPSASTGTGPGSSPSASTGTGPGASPGTSSTGSPGTPGSGTASSSPGSSTPSGATGSPGSSPSASTGTGPGSSPSASTGTGPGASPGTSSTGSPGASPGTSSTGSPGSSTPSGATGSPGSSPSASTGTGPGASPGTSSTGSPGSSPSASTGTGPGTPGSGTASSSPGSSTP

SEQ ID NO: 308 - protein, 540 aa, Artificial Sequence
  Description of Artificial Sequence: Synthetic polypeptide
TSSTGSPGASPGTSSTGSPGSSPSASTGTGPGTPGSGTASSSPGASPGTSSTGSPGASPGTSSTGSPGASPGTSSTGSPGSSTPSGATGSPGSSTPSGATGSPGASPGTSSTGSPGTPGSGTASSSPGSSTPSGATGSPGSSTPSGATGSPGSSTPSGATGSPGSSPSASTGTGPGASPGTSSTGSPGASPGTSSTGSPGTPGSGTASSSPGASPGTSSTGSPGASPGTSSTGSPGASPGTSSTGSPGASPGTSSTGSPGTPGSGTASSSPGSSTPSGATGSPGTPGSGTASSSPGSSTPSGATGSPGTPGSGTASSSPGSSTPSGATGSPGSSTPSGATGSPGSSPSASTGTGPGSSPSASTGTGPGASPGTSSTGSPGTPGSGTASSSPGSSTPSGATGSPGSSPSASTGTGPGSSPSASTGTGPGASPGTSSTGSPGASPGTSSTGSPGSSTPSGATGSPGSSPSASTGTGPGASPGTSSTGSPGSSPSASTGTGPGTPGSGTASSSPGSSTPSGATGSPGSSTPSGATGSPGASPG

SEQ ID NO: 309 - protein, 576 aa, Artificial Sequence
  Description of Artificial Sequence: Synthetic polypeptide
TSSTGSPGTPGSGTASSSPGASPGTSSTGSPGASPGTSSTGSPGASPGTSSTGSPGSSPSASTGTGPGTPGSGTASSSPGASPGTSSTGSPGASPGTSSTGSPGASPGTSSTGSPGSSTPSGATGSPGSSTPSGATGSPGASPGTSSTGSPGTPGSGTASSSPGSSTPSGATGSPGSSTPSGATGSPGSSTPSGATGSPGSSPSASTGTGPGASPGTSSTGSPGASPGTSSTGSPGTPGSGTASSSPGASPGTSSTGSPGASPGTSSTGSPGASPGTSSTGSPGASPGTSSTGSPGTPGSGTASSSPGSSTPSGATGSPGTPGSGTASSSPGSSTPSGATGSPGTPGSGTASSSPGSSTPSGATGSPGSSTPSGATGSPGSSPSASTGTGPGSSPSASTGTGPGASPGTSSTGSPGTPGSGTASSSPGSSTPSGATGSPGSSPSASTGTGPGSSPSASTGTGPGASPGTSSTGSPGASPGTSSTGSPGSSTPSGATGSPGSSPSASTGTGPGASPGTSSTGSPGSSPSASTGTGPGTPGSGTASSSPGSSTPSGATGSPGSSTPSGATGSPGASPG

SEQ ID NO: 310 - protein, 612 aa, Artificial Sequence
  Description of Artificial Sequence: Synthetic polypeptide
STGSPGTPGSGTASSSPGSSTPSGATGSPGASPGTSSTGSPGTPGSGTASSSPGSSTPSGATGSPGSSPSASTGTGPGSSPSASTGTGPGSSTPSGATGSPGSSTPSGATGSPGASPGTSSTGSPGASPGTSSTGSPGASPGTSSTGSPGTPGSGTASSSPGASPGTSSTGSPGASPGTSSTGSPGASPGTSSTGSPGSSPSASTGTGPGTPGSGTASSSPGASPGTSSTGSPGASPGTSSTGSPGASPGTSSTGSPGSSTPSGATGSPGSSTPSGATGSPGASPGTSSTGSPGTPGSGTASSSPGSSTPSGATGSPGSSTPSGATGSPGSSTPSGATGSPGSSPSASTGTGPGASPGTSSTGSPGASPGTSSTGSPGTPGSGTASSSPGASPGTSSTGSPGASPGTSSTGSPGASPGTSSTGSPGASPGTSSTGSPGTPGSGTASSSPGSSTPSGATGSPGTPGSGTASSSPGSSTPSGATGSPGTPGSGTASSSPGSSTPSGATGSPGSSTPSGATGSPGSSPSASTGTGPGSSPSASTGTGPGASPGTSSTGSPGTPGSGTASSSPGSSTPSGATGSPGSSPSASTGTGPGSSPSASTGTGPGASPGTS

SEQ ID NO: 311 - protein, 648 aa, Artificial Sequence
  Description of Artificial Sequence: Synthetic polypeptide
GTASSSPGSSTPSGATGSPGSSPSASTGTGPGSSPSASTGTGPGSSTPSGATGSPGSSTPSGATGSPGASPGTSSTGSPGASPGTSSTGSPGASPGTSSTGSPGTPGSGTASSSPGASPGTSSTGSPGASPGTSSTGSPGASPGTSSTGSPGSSPSASTGTGPGTPGSGTASSSPGASPGTSSTGSPGASPGTSSTGSPGASPGTSSTGSPGSSTPSGATGSPGSSTPSGATGSPGASPGTSSTGSPGTPGSGTASSSPGSSTPSGATGSPGSSTPSGATGSPGSSTPSGATGSPGSSPSASTGTGPGASPGTSSTGSPGASPGTSSTGSPGTPGSGTASSSPGASPGTSSTGSPGASPGTSSTGSPGASPGTSSTGSPGASPGTSSTGSPGTPGSGTASSSPGSSTPSGATGSPGTPGSGTASSSPGSSTPSGATGSPGTPGSGTASSSPGSSTPSGATGSPGSSTPSGATGSPGSSPSASTGTGPGSSPSASTGTGPGASPGTSSTGSPGTPGSGTASSSPGSSTPSGATGSPGSSPSASTGTGPGSSPSASTGTGPGASPGTSSTGSPGASPGTSSTGSPGSSTPSGATGSPGSSPSASTGTGPGASPGTSSTGSPGSSPSASTGTGPGTPGSGTASSSPGSSTP

SEQ ID NO: 312 - protein, 684 aa, Artificial Sequence
  Description of Artificial Sequence: Synthetic polypeptide
TSSTGSPGTPGSGTASSSPGSSTPSGATGSPGSSPSASTGTGPGSSPSASTGTGPGSSTPSGATGSPGSSTPSGATGSPGASPGTSSTGSPGASPGTSSTGSPGASPGTSSTGSPGTPGSGTASSSPGASPGTSSTGSPGASPGTSSTGSPGASPGTSSTGSPGSSPSASTGTGPGTPGSGTASSSPGASPGTSSTGSPGASPGTSSTGSPGASPGTSSTGSPGSSTPSGATGSPGSSTPSGATGSPGASPGTSSTGSPGTPGSGTASSSPGSSTPSGATGSPGSSTPSGATGSPGSSTPSGATGSPGSSPSASTGTGPGASPGTSSTGSPGASPGTSSTGSPGTPGSGTASSSPGASPGTSSTGSPGASPGTSSTGSPGASPGTSSTGSPGASPGTSSTGSPGTPGSGTASSSPGSSTPSGATGSPGTPGSGTASSSPGSSTPSGATGSPGTPGSGTASSSPGSSTPSGATGSPGSSTPSGATGSPGSSPSASTGTGPGSSPSASTGTGPGASPGTSSTGSPGTPGSGTASSSPGSSTPSGATGSPGSSPSASTGTGPGSSPSASTGTGPGASPGTSSTGSPGASPGTSSTGSPGSSTPSGATGSPGSSPSASTGTGPGASPGTSSTGSPGSSPSASTGTGPGTPGSGTASSSPGSSTPSGATGSPGSSTPSGATGSPGASPG

SEQ ID NO: 313 - protein, 720 aa, Artificial Sequence
  Description of Artificial Sequence: Synthetic polypeptide
TSSTGSPGTPGSGTASSSPGSSTPSGATGSPGASPGTSSTGSPGTPGSGTASSSPGSSTPSGATGSPGSSPSASTGTGPGSSPSASTGTGPGSSTPSGATGSPGSSTPSGATGSPGASPGTSSTGSPGASPGTSSTGSPGASPGTSSTGSPGTPGSGTASSSPGASPGTSSTGSPGASPGTSSTGSPGASPGTSSTGSPGSSPSASTGTGPGTPGSGTASSSPGASPGTSSTGSPGASPGTSSTGSPGASPGTSSTGSPGSSTPSGATGSPGSSTPSGATGSPGASPGTSSTGSPGTPGSGTASSSPGSSTPSGATGSPGSSTPSGATGSPGSSTPSGATGSPGSSPSASTGTGPGASPGTSSTGSPGASPGTSSTGSPGTPGSGTASSSPGASPGTSSTGSPGASPGTSSTGSPGASPGTSSTGSPGASPGTSSTGSPGTPGSGTASSSPGSSTPSGATGSPGTPGSGTASSSPGSSTPSGATGSPGTPGSGTASSSPGSSTPSGATGSPGSSTPSGATGSPGSSPSASTGTGPGSSPSASTGTGPGASPGTSSTGSPGTPGSGTASSSPGSSTPSGATGSPGSSPSASTGTGPGSSPSASTGTGPGASPGTSSTGSPGASPGTSSTGSPGSSTPSGATGSPGSSPSASTGTGPGASPGTSSTGSPGSSPSASTGTGPGTPGSGTASSSPGSSTPSGATGSPGSSTPSGATGSPGASPG

SEQ ID NO: 314 - protein, 756 aa, Artificial Sequence
  Description of Artificial Sequence: Synthetic polypeptide
TSSTGSPGSSPSASTGTGPGSSPSASTGTGPGTPGSGTASSSPGSSTPSGATGSPGSSPSASTGTGPGASPGTSSTGSPGTPGSGTASSSPGSSTPSGATGSPGTPGSGTASSSPGASPGTSSTGSPGASPGTSSTGSPGTPGSGTASSSPGSSTPSGATGSPGASPGTSSTGSPGTPGSGTASSSPGSSTPSGATGSPGSSPSASTGTGPGSSPSASTGTGPGSSTPSGATGSPGSSTPSGATGSPGASPGTSSTGSPGASPGTSSTGSPGASPGTSSTGSPGTPGSGTASSSPGASPGTSSTGSPGASPGTSSTGSPGASPGTSSTGSPGSSPSASTGTGPGTPGSGTASSSPGASPGTSSTGSPGASPGTSSTGSPGASPGTSSTGSPGSSTPSGATGSPGSSTPSGATGSPGASPGTSSTGSPGTPGSGTASSSPGSSTPSGATGSPGSSTPSGATGSPGSSTPSGATGSPGSSPSASTGTGPGASPGTSSTGSPGASPGTSSTGSPGTPGSGTASSSPGASPGTSSTGSPGASPGTSSTGSPGASPGTSSTGSPGASPGTSSTGSPGTPGSGTASSSPGSSTPSGATGSPGTPGSGTASSSPGSSTPSGATGSPGTPGSGTASSSPGSSTPSGATGSPGSSTPSGATGSPGSSPSASTGTGPGSSPSASTGTGPGASPGTSSTGSPGTPGSGTASSSPGSSTPSGATGSPGSSPSASTGTGPGSSPSASTGTGPGASPGTSSTGSPGASPG

SEQ ID NO: 315 - protein, 792 aa, Artificial Sequence
  Description of Artificial Sequence: Synthetic polypeptide
TSSTGSPGSSPSASTGTGPGSSPSASTGTGPGTPGSGTASSSPGSSTPSGATGSPGSSPSASTGTGPGASPGTSSTGSPGTPGSGTASSSPGSSTPSGATGSPGTPGSGTASSSPGASPGTSSTGSPGASPGTSSTGSPGTPGSGTASSSPGSSTPSGATGSPGASPGTSSTGSPGTPGSGTASSSPGSSTPSGATGSPGSSPSASTGTGPGSSPSASTGTGPGSSTPSGATGSPGSSTPSGATGSPGASPGTSSTGSPGASPGTSSTGSPGASPGTSSTGSPGTPGSGTASSSPGASPGTSSTGSPGASPGTSSTGSPGASPGTSSTGSPGSSPSASTGTGPGTPGSGTASSSPGASPGTSSTGSPGASPGTSSTGSPGASPGTSSTGSPGSSTPSGATGSPGSSTPSGATGSPGASPGTSSTGSPGTPGSGTASSSPGSSTPSGATGSPGSSTPSGATGSPGSSTPSGATGSPGSSPSASTGTGPGASPGTSSTGSPGASPGTSSTGSPGTPGSGTASSSPGASPGTSSTGSPGASPGTSSTGSPGASPGTSSTGSPGASPGTSSTGSPGTPGSGTASSSPGSSTPSGATGSPGTPGSGTASSSPGSSTPSGATGSPGTPGSGTASSSPGSSTPSGATGSPGSSTPSGATGSPGSSPSASTGTGPGSSPSASTGTGPGASPGTSSTGSPGTPGSGTASSSPGSSTPSGATGSPGSSPSASTGTGPGSSPSASTGTGPGASPGTSSTGSPGASPGTSSTGSPGSSTPSGATGSPGSSPSASTGTGPGASPG

SEQ ID NO: 316 - protein, 828 aa, Artificial Sequence
  Description of Artificial Sequence: Synthetic polypeptide
TSSTGSPGSSPSASTGTGPGSSPSASTGTGPGTPGSGTASSSPGSSTPSGATGSPGSSPSASTGTGPGASPGTSSTGSPGTPGSGTASSSPGSSTPSGATGSPGTPGSGTASSSPGASPGTSSTGSPGASPGTSSTGSPGTPGSGTASSSPGSSTPSGATGSPGASPGTSSTGSPGTPGSGTASSSPGSSTPSGATGSPGSSPSASTGTGPGSSPSASTGTGPGSSTPSGATGSPGSSTPSGATGSPGASPGTSSTGSPGASPGTSSTGSPGASPGTSSTGSPGTPGSGTASSSPGASPGTSSTGSPGASPGTSSTGSPGASPGTSSTGSPGSSPSASTGTGPGTPGSGTASSSPGASPGTSSTGSPGASPGTSSTGSPGASPGTSSTGSPGSSTPSGATGSPGSSTPSGATGSPGASPGTSSTGSPGTPGSGTASSSPGSSTPSGATGSPGSSTPSGATGSPGSSTPSGATGSPGSSPSASTGTGPGASPGTSSTGSPGASPGTSSTGSPGTPGSGTASSSPGASPGTSSTGSPGASPGTSSTGSPGASPGTSSTGSPGASPGTSSTGSPGTPGSGTASSSPGSSTPSGATGSPGTPGSGTASSSPGSSTPSGATGSPGTPGSGTASSSPGSSTPSGATGSPGSSTPSGATGSPGSSPSASTGTGPGSSPSASTGTGPGASPGTSSTGSPGTPGSGTASSSPGSSTPSGATGSPGSSPSASTGTGPGSSPSASTGTGPGASPGTSSTGSPGASPGTSSTGSPGSSTPSGATGSPGSSPSASTGTGPGASPGTSSTGSPGSSPSASTGTGPGTPGSGTASSSPGSSTP

SEQ ID NO: 317 - protein, 869 aa, Artificial Sequence
  Description of Artificial Sequence: Synthetic polypeptide
GSPGSPAGSPTSTEEGTSESATPESGPGTSTEPSEGSAPGSPAGSPTSTEEGTSTEPSEGSAPGTSTEPSEGSAPGTSESATPESGPGSEPATSGSETPGSEPATSGSETPGSPAGSPTSTEEGTSESATPESGPGTSTEPSEGSAPGTSTEPSEGSAPGSPAGSPTSTEEGTSTEPSEGSAPGTSTEPSEGSAPGTSESATPESGPGTSTEPSEGSAPGTSESATPESGPGSEPATSGSETPGTSTEPSEGSAPGTSTEPSEGSAPGTSESATPESGPGTSESATPESGPGSPAGSPTSTEEGTSESATPESGPGSEPATSGSETPGTSESATPESGPGTSTEPSEGSAPGTSTEPSEGSAPGTSTEPSEGSAPGTSTEPSEGSAPGTSTEPSEGSAPGTSTEPSEGSAPGSPAGSPTSTEEGTSTEPSEGSAPGTSESATPESGPGSEPATSGSETPGTSESATPESGPGSEPATSGSETPGTSESATPESGPGTSTEPSEGSAPGTSESATPESGPGSPAGSPTSTEEGSPAGSPTSTEEGSPAGSPTSTEEGTSESATPESGPGTSTEPSEGSAPGTSESATPESGPGSEPATSGSETPGTSESATPESGPGSEPATSGSETPGTSESATPESGPGTSTEPSEGSAPGSPAGSPTSTEEGTSESATPESGPGSEPATSGSETPGTSESATPESGPGSPAGSPTSTEEGSPAGSPTSTEEGTSTEPSEGSAPGTSESATPESGPGTSESATPESGPGTSESATPESGPGSEPATSGSETPGSEPATSGSETPGSPAGSPTSTEEGTSTEPSEGSAPGTSTEPSEGSAPGSEPATSGSETPGTSESATPESGPGTSTEPSEGSAPGR

SEQ ID NO: 318 - protein, 144 aa, Artificial Sequence
  Description of Artificial Sequence: Synthetic polypeptide
SAGSPGSPAGSPTSTEEGTSESATPESGPGTSTEPSEGSAPGSPAGSPTSTEEGTSTEPSEGSAPGTSTEPSEGSAPGTSESATPESGPGSEPATSGSETPGSEPATSGSETPGSPAGSPTSTEEGTSESATPESGPGTESASR

SEQ ID NO: 319 - protein, 288 aa, Artificial Sequence
  Description of Artificial Sequence: Synthetic polypeptide
SAGSPTGPGSEPATSGSETPGTSESATPESGPGSEPATSGSETPGTSESATPESGPGTSTEPSEGSAPGSPAGSPTSTEEGTSESATPESGPGSEPATSGSETPGTSESATPESGPGSPAGSPTSTEEGSPAGSPTSTEEGTSTEPSEGSAPGTSESATPESGPGTSESATPESGPGTSESATPESGPGSEPATSGSETPGSEPATSGSETPGSPAGSPTSTEEGTSTEPSEGSAPGTSTEPSEGSAPGSEPATSGSETPGTSESATPESGPGTSTEPSEGSAPSASR

SEQ ID NO: 320 - protein, 432 aa, Artificial Sequence
  Description of Artificial Sequence: Synthetic polypeptide
SAGSPGSPAGSPTSTEEGTSESATPESGPGTSTEPSEGSAPGSPAGSPTSTEEGTSTEPSEGSAPGTSTEPSEGSAPGTSESATPESGPGSEPATSGSETPGSEPATSGSETPGSPAGSPTSTEEGTSESATPESGPGTSTEPSEGSAPGTSTEPSEGSAPGSPAGSPTSTEEGTSTEPSEGSAPGTSTEPSEGSAPGTSESATPESGPGTSTEPSEGSAPGTSESATPESGPGSEPATSGSETPGTSTEPSEGSAPGTSTEPSEGSAPGTSESATPESGPGTSESATPESGPGSPAGSPTSTEEGTSESATPESGPGSEPATSGSETPGTSESATPESGPGTSTEPSEGSAPGTSTEPSEGSAPGTSTEPSEGSAPGTSTEPSEGSAPGTSTEPSEGSAPGTSTEPSEGSAPGSPAGSPTSTEEGTESASR

SEQ ID NO: 321 - protein, 576 aa, Artificial Sequence
  Description of Artificial Sequence: Synthetic polypeptide
SAGSPTEEGTSESATPESGPGSEPATSGSETPGTSESATPESGPGTSTEPSEGSAPGTSTEPSEGSAPGTSTEPSEGSAPGTSTEPSEGSAPGTSTEPSEGSAPGTSTEPSEGSAPGSPAGSPTSTEEGTSTEPSEGSAPGTSESATPESGPGSEPATSGSETPGTSESATPESGPGSEPATSGSETPGTSESATPESGPGTSTEPSEGSAPGTSESATPESGPGSPAGSPTSTEEGSPAGSPTSTEEGSPAGSPTSTEEGTSESATPESGPGTSTEPSEGSAPGTSESATPESGPGSEPATSGSETPGTSESATPESGPGSEPATSGSETPGTSESATPESGPGTSTEPSEGSAPGSPAGSPTSTEEGTSESATPESGPGSEPATSGSETPGTSESATPESGPGSPAGSPTSTEEGSPAGSPTSTEEGTSTEPSEGSAPGTSESATPESGPGTSESATPESGPGTSESATPESGPGSEPATSGSETPGSEPATSGSETPGSPAGSPTSTEEGTSTEPSEGSAPGTSTEPSEGSAPGSEPATSGSETPGTSESATPESGPGTSTEPSEGSAPSASR

SEQ ID NO: 322 - protein, 864 aa, Artificial Sequence
  Description of Artificial Sequence: Synthetic polypeptide
SAGSPGSPAGSPTSTEEGTSESATPESGPGTSTEPSEGSAPGSPAGSPTSTEEGTSTEPSEGSAPGTSTEPSEGSAPGTSESATPESGPGSEPATSGSETPGSEPATSGSETPGSPAGSPTSTEEGTSESATPESGPGTSTEPSEGSAPGTSTEPSEGSAPGSPAGSPTSTEEGTSTEPSEGSAPGTSTEPSEGSAPGTSESATPESGPGTSTEPSEGSAPGTSESATPESGPGSEPATSGSETPGTSTEPSEGSAPGTSTEPSEGSAPGTSESATPESGPGTSESATPESGPGSPAGSPTSTEEGTSESATPESGPGSEPATSGSETPGTSESATPESGPGTSTEPSEGSAPGTSTEPSEGSAPGTSTEPSEGSAPGTSTEPSEGSAPGTSTEPSEGSAPGTSTEPSEGSAPGSPAGSPTSTEEGTSTEPSEGSAPGTSESATPESGPGSEPATSGSETPGTSESATPESGPGSEPATSGSETPGTSESATPESGPGTSTEPSEGSAPGTSESATPESGPGSPAGSPTSTEEGSPAGSPTSTEEGSPAGSPTSTEEGTSESATPESGPGTSTEPSEGSAPGTSESATPESGPGSEPATSGSETPGTSESATPESGPGSEPATSGSETPGTSESATPESGPGTSTEPSEGSAPGSPAGSPTSTEEGTSESATPESGPGSEPATSGSETPGTSESATPESGPGSPAGSPTSTEEGSPAGSPTSTEEGTSTEPSEGSAPGTSESATPESGPGTSESATPESGPGTSESATPESGPGSEPATSGSETPGSEPATSGSETPGSPAGSPTSTEEGTSTEPSEGSAPGTSTEPSEGSAPGSEPATSGSETPGTSESATPESGPGTESASR

SEQ ID NO: 323 - protein, 864 aa, Artificial Sequence
  Description of Artificial Sequence: Synthetic polypeptide
SAGSPGSTSSTAESPGPGSTSSTAESPGPGSTSESPSGTAPGSTSSTAESPGPGSTSSTAESPGPGTSTPESGSASPGSTSESPSGTAPGTSPSGESSTAPGSTSESPSGTAPGSTSESPSGTAPGTSPSGESSTAPGSTSESPSGTAPGSTSESPSGTAPGTSPSGESSTAPGSTSESPSGTAPGSTSESPSGTAPGSTSESPSGTAPGTSTPESGSASPGSTSESPSGTAPGTSTPESGSASPGSTSSTAESPGPGSTSSTAESPGPGTSTPESGSASPGTSTPESGSASPGSTSESPSGTAPGTSTPESGSASPGTSTPESGSASPGSTSESPSGTAPGSTSESPSGTAPGSTSESPSGTAPGSTSSTAESPGPGTSTPESGSASPGTSTPESGSASPGSTSESPSGTAPGSTSESPSGTAPGTSTPESGSASPGSTSESPSGTAPGSTSESPSGTAPGTSTPESGSASPGTSPSGESSTAPGSTSSTAESPGPGTSPSGESSTAPGSTSSTAESPGPGTSTPESGSASPGSTSESPSGTAPGSTSSTAESPGPGTSTPESGSASPGTSTPESGSASPGSTSSTAESPGPGTSPSGESSTAPGTSTPESGSASPGSTSESPSGTAPGSTSESPSGTAPGTSTPESGSASPGTSPSGESSTAPGSTSSTAESPGPGTSPSGESSTAPGSTSSTAESPGPGSTSSTAESPGPGTSPSGESSTAPGSTSESPSGTAPGSTSESPSGTAPGTSTPESGSASPGSTSESPSGTAPGSTSESPSGTAPGTSTPESGSASPGSTSESPSGTAPGSTSESPSGTAPGSTSESPSGTAPGSTSSTAESPGPGTSPSGESSTAPGTSSASR

SEQ ID NO: 324 - protein, 864 aa, Artificial Sequence
  Description of Artificial Sequence: Synthetic polypeptide
SAGSPGASPGTSSTGSPGSSPSASTGTGPGSSPSASTGTGPGTPGSGTASSSPGSSTPSGATGSPGSSPSASTGTGPGASPGTSSTGSPGTPGSGTASSSPGSSTPSGATGSPGTPGSGTASSSPGASPGTSSTGSPGASPGTSSTGSPGTPGSGTASSSPGSSTPSGATGSPGASPGTSSTGSPGTPGSGTASSSPGSSTPSGATGSPGSSPSASTGTGPGSSPSASTGTGPGSSTPSGATGSPGSSTPSGATGSPGASPGTSSTGSPGASPGTSSTGSPGASPGTSSTGSPGTPGSGTASSSPGASPGTSSTGSPGASPGTSSTGSPGASPGTSSTGSPGSSPSASTGTGPGTPGSGTASSSPGASPGTSSTGSPGASPGTSSTGSPGASPGTSSTGSPGSSTPSGATGSPGSSTPSGATGSPGASPGTSSTGSPGTPGSGTASSSPGSSTPSGATGSPGSSTPSGATGSPGSSTPSGATGSPGSSPSASTGTGPGASPGTSSTGSPGASPGTSSTGSPGTPGSGTASSSPGASPGTSSTGSPGASPGTSSTGSPGASPGTSSTGSPGASPGTSSTGSPGTPGSGTASSSPGSSTPSGATGSPGTPGSGTASSSPGSSTPSGATGSPGTPGSGTASSSPGSSTPSGATGSPGSSTPSGATGSPGSSPSASTGTGPGSSPSASTGTGPGASPGTSSTGSPGTPGSGTASSSPGSSTPSGATGSPGSSPSASTGTGPGSSPSASTGTGPGASPGTSSTGSPGASPGTSSTGSPGSSTPSGATGSPGSSPSASTGTGPGASPGTSSTGSPGSSPSASTGTGPGTPGSGTASSSPGSSTPSGATGSPGSSTPSGATGSPGASSASR

SEQ ID NO: 325 - protein, 864 aa, Artificial Sequence
  Description of Artificial Sequence: Synthetic polypeptide
GSPGAGSPAGSPTSTEEGTSESATPESGPGTSTEPSEGSAPGSPAGSPTSTEEGTSTEPSEGSAPGTSTEPSEGSAPGTSESATPESGPGSEPATSGSETPGSEPATSGSETPGSPAGSPTSTEEGTSESATPESGPGTSTEPSEGSAPGTSTEPSEGSAPGSPAGSPTSTEEGTSTEPSEGSAPGTSTEPSEGSAPGTSESATPESGPGTSTEPSEGSAPGTSESATPESGPGSEPATSGSETPGTSTEPSEGSAPGTSTEPSEGSAPGTSESATPESGPGTSESATPESGPGSPAGSPTSTEEGTSESATPESGPGSEPATSGSETPGTSESATPESGPGTSTEPSEGSAPGTSTEPSEGSAPGTSTEPSEGSAPGTSTEPSEGSAPGTSTEPSEGSAPGTSTEPSEGSAPGSPAGSPTSTEEGTSTEPSEGSAPGTSESATPESGPGSEPATSGSETPGTSESATPESGPGSEPATSGSETPGTSESATPESGPGTSTEPSEGSAPGTSESATPESGPGSPAGSPTSTEEGSPAGSPTSTEEGSPAGSPTSTEEGTSESATPESGPGTSTEPSEGSAPGTSESATPESGPGSEPATSGSETPGTSESATPESGPGSEPATSGSETPGTSESATPESGPGTSTEPSEGSAPGSPAGSPTSTEEGTSESATPESGPGSEPATSGSETPGTSESATPESGPGSPAGSPTSTEEGSPAGSPTSTEEGTSTEPSEGSAPGTSESATPESGPGTSESATPESGPGTSESATPESGPGSEPATSGSETPGSEPATSGSETPGSPAGSPTSTEEGTSTEPSEGSAPGTSTEPSEGSAPGSEPATSGSETPGTSESATPESGPGTESASR

SEQ ID NO: 326 - protein, 713 aa, Artificial Sequence
  Description of Artificial Sequence: Synthetic polypeptide
PGSPAGSPTSTEEGTSESATPESGPGTSTEPSEGSAPGSPAGSPTSTEEGTSTEPSEGSAPGTSTEPSEGSAPGTSESATPESGPGSEPATSGSETPGSEPATSGSETPGSPAGSPTSTEEGTSESATPESGPGTSTEPSEGSAPGTSTEPSEGSAPGSPAGSPTSTEEGTSTEPSEGSAPGTSTEPSEGSAPGTSESATPESGPGTSTEPSEGSAPGTSESATPESGPGSEPATSGSETPGTSTEPSEGSAPGTSTEPSEGSAPGTSESATPESGPGTSESATPESGPGSPAGSPTSTEEGTSESATPESGPGSEPATSGSETPGTSESATPESGPGTSTEPSEGSAPGTSTEPSEGSAPGTSTEPSEGSAPGTSTEPSEGSAPGTSTEPSEGSAPGTSTEPSEGSAPGSPAGSPTSTEEGTSTEPSEGSAPGTSESATPESGPGSEPATSGSETPGTSESATPESGPGSEPATSGSETPGTSESATPESGPGTSTEPSEGSAPGTSESATPESGPGSPAGSPTSTEEGSPAGSPTSTEEGSPAGSPTSTEEGTSESATPESGPGTSTEPSEGSAPGTSESATPESGPGSEPATSGSETPGTSESATPESGPGSEPATSGSETPGTSESATPESGPGTSTEPSEGSAPGSPAGSPTSTEEGTSESATPESGPGSEPATSGSETPGTSESATPESGPGSPAGSPTSTEEGSPA

SEQ ID NO: 327 - protein, 717 aa, Artificial Sequence
  Description of Artificial Sequence: Synthetic polypeptide
PGSPAGSPTSTEEGTSESATPESGPGTSTEPSEGSAPGSPAGSPTSTEEGTSTEPSEGSAPGTSTEPSEGSAPGTSESATPESGPGSEPATSGSETPGSEPATSGSETPGSPAGSPTSTEEGTSESATPESGPGTSTEPSEGSAPGTSTEPSEGSAPGSPAGSPTSTEEGTSTEPSEGSAPGTSTEPSEGSAPGTSESATPESGPGTSTEPSEGSAPGTSESATPESGPGSEPATSGSETPGTSTEPSEGSAPGTSTEPSEGSAPGTSESATPESGPGTSESATPESGPGSPAGSPTSTEEGTSESATPESGPGSEPATSGSETPGTSESATPESGPGTSTEPSEGSAPGTSTEPSEGSAPGTSTEPSEGSAPGTSTEPSEGSAPGTSTEPSEGSAPGTSTEPSEGSAPGSPAGSPTSTEEGTSTEPSEGSAPGTSESATPESGPGSEPATSGSETPGTSESATPESGPGSEPATSGSETPGTSESATPESGPGTSTEPSEGSAPGTSESATPESGPGSPAGSPTSTEEGSPAGSPTSTEEGSPAGSPTSTEEGTSESATPESGPGTSTEPSEGSAPGTSESATPESGPGSEPATSGSETPGTSESATPESGPGSEPATSGSETPGTSESATPESGPGTSTEPSEGSAPGSPAGSPTSTEEGTSESATPESGPGSEPATSGSETPGTSESATPESGPGSPAGSPTSTEEGSPASASR

SEQ ID NO: 328 - protein, 146 aa, Artificial Sequence
  Description of Artificial Sequence: Synthetic polypeptide
PGSPAGSPTSTEEGTSESATPESGPGTSTEPSEGSAPGSPAGSPTSTEEGTSTEPSEGSAPGTSTEPSEGSAPGTSESATPESGPGSEPATSGSETPGSEPATSGSETPGSPAGSPTSTEEGTSESATPESGPGTSTEPSEGSAPG

SEQ ID NO: 329 - protein, 150 aa, Artificial Sequence
  Description of Artificial Sequence: Synthetic polypeptide
PGSPAGSPTSTEEGTSESATPESGPGTSTEPSEGSAPGSPAGSPTSTEEGTSTEPSEGSAPGTSTEPSEGSAPGTSESATPESGPGSEPATSGSETPGSEPATSGSETPGSPAGSPTSTEEGTSESATPESGPGTSTEPSEGSAPGSASR

SEQ ID NO: 330 - protein, 818 aa, Artificial Sequence
  Description of Artificial Sequence: Synthetic polypeptide
PGSPAGSPTSTEEGTSESATPESGPGTSTEPSEGSAPGSPAGSPTSTEEGTSTEPSEGSAPGTSTEPSEGSAPGTSESATPESGPGSEPATSGSETPGSEPATSGSETPGSPAGSPTSTEEGTSESATPESGPGTSTEPSEGSAPGTSTEPSEGSAPGSPAGSPTSTEEGTSTEPSEGSAPGTSTEPSEGSAPGTSESATPESGPGTSTEPSEGSAPGTSESATPESGPGSEPATSGSETPGTSTEPSEGSAPGTSTEPSEGSAPGTSESATPESGPGTSESATPESGPGSPAGSPTSTEEGTSESATPESGPGSEPATSGSETPGTSESATPESGPGTSTEPSEGSAPGTSTEPSEGSAPGTSTEPSEGSAPGTSTEPSEGSAPGTSTEPSEGSAPGTSTEPSEGSAPGSPAGSPTSTEEGTSTEPSEGSAPGTSESATPESGPGSEPATSGSETPGTSESATPESGPGSEPATSGSETPGTSESATPESGPGTSTEPSEGSAPGTSESATPESGPGSPAGSPTSTEEGSPAGSPTSTEEGSPAGSPTSTEEGTSESATPESGPGTSTEPSEGSAPGTSESATPESGPGSEPATSGSETPGTSESATPESGPGSEPATSGSETPGTSESATPESGPGTSTEPSEGSAPGSPAGSPTSTEEGTSESATPESGPGSEPATSGSETPGTSESATPESGPGSPAGSPTSTEEGSPAGSPTSTEEGTSTEPSEGSAPGTSESATPESGPGTSESATPESGPGTSESATPESGPGSEPATSGSETPGSEPATSGSETPGSPAGSPTSTEEGTSTEPSEGSAPG

SEQ ID NO: 331 - protein, 822 aa, Artificial Sequence
  Description of Artificial Sequence: Synthetic polypeptide
PGSPAGSPTSTEEGTSESATPESGPGTSTEPSEGSAPGSPAGSPTSTEEGTSTEPSEGSAPGTSTEPSEGSAPGTSESATPESGPGSEPATSGSETPGSEPATSGSETPGSPAGSPTSTEEGTSESATPESGPGTSTEPSEGSAPGTSTEPSEGSAPGSPAGSPTSTEEGTSTEPSEGSAPGTSTEPSEGSAPGTSESATPESGPGTSTEPSEGSAPGTSESATPESGPGSEPATSGSETPGTSTEPSEGSAPGTSTEPSEGSAPGTSESATPESGPGTSESATPESGPGSPAGSPTSTEEGTSESATPESGPGSEPATSGSETPGTSESATPESGPGTSTEPSEGSAPGTSTEPSEGSAPGTSTEPSEGSAPGTSTEPSEGSAPGTSTEPSEGSAPGTSTEPSEGSAPGSPAGSPTSTEEGTSTEPSEGSAPGTSESATPESGPGSEPATSGSETPGTSESATPESGPGSEPATSGSETPGTSESATPESGPGTSTEPSEGSAPGTSESATPESGPGSPAGSPTSTEEGSPAGSPTSTEEGSPAGSPTSTEEGTSESATPESGPGTSTEPSEGSAPGTSESATPESGPGSEPATSGSETPGTSESATPESGPGSEPATSGSETPGTSESATPESGPGTSTEPSEGSAPGSPAGSPTSTEEGTSESATPESGPGSEPATSGSETPGTSESATPESGPGSPAGSPTSTEEGSPAGSPTSTEEGTSTEPSEGSAPGTSESATPESGPGTSESATPESGPGTSESATPESGPGSEPATSGSETPGSEPATSGSETPGSPAGSPTSTEEGTSTEPSEGSAPGSASR

SEQ ID NO: 332 - protein, 626 aa, Artificial Sequence
  Description of Artificial Sequence: Synthetic polypeptide
PGSPAGSPTSTEEGTSESATPESGPGTSTEPSEGSAPGSPAGSPTSTEEGTSTEPSEGSAPGTSTEPSEGSAPGTSESATPESGPGSEPATSGSETPGSEPATSGSETPGSPAGSPTSTEEGTSESATPESGPGTSTEPSEGSAPGTSTEPSEGSAPGSPAGSPTSTEEGTSTEPSEGSAPGTSTEPSEGSAPGTSESATPESGPGTSTEPSEGSAPGTSESATPESGPGSEPATSGSETPGTSTEPSEGSAPGTSTEPSEGSAPGTSESATPESGPGTSESATPESGPGSPAGSPTSTEEGTSESATPESGPGSEPATSGSETPGTSESATPESGPGTSTEPSEGSAPGTSTEPSEGSAPGTSTEPSEGSAPGTSTEPSEGSAPGTSTEPSEGSAPGTSTEPSEGSAPGSPAGSPTSTEEGTSTEPSEGSAPGTSESATPESGPGSEPATSGSETPGTSESATPESGPGSEPATSGSETPGTSESATPESGPGTSTEPSEGSAPGTSESATPESGPGSPAGSPTSTEEGSPAGSPTSTEEGSPAGSPTSTEEGTSESATPESGPGTSTEPSEGSAPGTSESATPESGPGSEPATSGSETPGTSESATPESGPGSEPATSGSETPG

SEQ ID NO: 333 - protein, 630 aa, Artificial Sequence
  Description of Artificial Sequence: Synthetic polypeptide
PGSPAGSPTSTEEGTSESATPESGPGTSTEPSEGSAPGSPAGSPTSTEEGTSTEPSEGSAPGTSTEPSEGSAPGTSESATPESGPGSEPATSGSETPGSEPATSGSETPGSPAGSPTSTEEGTSESATPESGPGTSTEPSEGSAPGTSTEPSEGSAPGSPAGSPTSTEEGTSTEPSEGSAPGTSTEPSEGSAPGTSESATPESGPGTSTEPSEGSAPGTSESATPESGPGSEPATSGSETPGTSTEPSEGSAPGTSTEPSEGSAPGTSESATPESGPGTSESATPESGPGSPAGSPTSTEEGTSESATPESGPGSEPATSGSETPGTSESATPESGPGTSTEPSEGSAPGTSTEPSEGSAPGTSTEPSEGSAPGTSTEPSEGSAPGTSTEPSEGSAPGTSTEPSEGSAPGSPAGSPTSTEEGTSTEPSEGSAPGTSESATPESGPGSEPATSGSETPGTSESATPESGPGSEPATSGSETPGTSESATPESGPGTSTEPSEGSAPGTSESATPESGPGSPAGSPTSTEEGSPAGSPTSTEEGSPAGSPTSTEEGTSESATPESGPGTSTEPSEGSAPGTSESATPESGPGSEPATSGSETPGTSESATPESGPGSEPATSGSETPGSASR

SEQ ID NO: 334 - protein, 1298 aa, Artificial Sequence
  Description of Artificial Sequence: Synthetic polypeptide
PGSPAGSPTSTEEGTSESATPESGPGTSTEPSEGSAPGSPAGSPTSTEEGTSTEPSEGSAPGTSTEPSEGSAPGTSESATPESGPGSEPATSGSETPGSEPATSGSETPGSPAGSPTSTEEGTSESATPESGPGTSTEPSEGSAPGTSTEPSEGSAPGSPAGSPTSTEEGTSTEPSEGSAPGTSTEPSEGSAPGTSESATPESGPGTSTEPSEGSAPGTSESATPESGPGSEPATSGSETPGTSTEPSEGSAPGTSTEPSEGSAPGTSESATPESGPGTSESATPESGPGSPAGSPTSTEEGTSESATPESGPGSEPATSGSETPGTSESATPESGPGTSTEPSEGSAPGTSTEPSEGSAPGTSTEPSEGSAPGTSTEPSEGSAPGTSTEPSEGSAPGTSTEPSEGSAPGSPAGSPTSTEEGTSTEPSEGSAPGTSESATPESGPGSEPATSGSETPGTSESATPESGPGSEPATSGSETPGTSESATPESGPGTSTEPSEGSAPGTSESATPESGPGSPAGSPTSTEEGSPAGSPTSTEEGSPAGSPTSTEEGTSESATPESGPGTSTEPSEGSAPGTSESATPESGPGSEPATSGSETPGTSESATPESGPGSEPATSGSETPGTSESATPESGPGTSTEPSEGSAPGSPAGSPTSTEEGTSESATPESGPGSEPATSGSETPGTSESATPESGPGSPAGSPTSTEEGSPAGSPTSTEEGTSTEPSEGSAPGTSESATPESGPGTSESATPESGPGTSESATPESGPGSEPATSGSETPGSEPATSGSETPGSPAGSPTSTEEGTSTEPSEGSAPGTSTEPSEGSAPGSEPATSGSETPGTSESATPESGPGTSTEPSEGSAPGSPAGSPTSTEEGTSESATPESGPGTSTEPSEGSAPGSPAGSPTSTEEGTSTEPSEGSAPGTSTEPSEGSAPGTSESATPESGPGSEPATSGSETPGSEPATSGSETPGSPAGSPTSTEEGTSESATPESGPGTSTEPSEGSAPGTSTEPSEGSAPGSPAGSPTSTEEGTSTEPSEGSAPGTSTEPSEGSAPGTSESATPESGPGTSTEPSEGSAPGTSESATPESGPGSEPATSGSETPGTSTEPSEGSAPGTSTEPSEGSAPGTSESATPESGPGTSESATPESGPGSPAGSPTSTEEGTSESATPESGPGSEPATSGSETPGTSESATPESGPGTSTEPSEGSAPGTSTEPSEGSAPGTSTEPSEGSAPGTSTEPSEGSAPGTSTEPSEGSAPGTSTEPSEGSAPGSPAGSPTSTEEGTSTEPSEGSAPG

SEQ ID NO: 335 - protein, 1302 aa, Artificial Sequence
  Description of Artificial Sequence: Synthetic polypeptide
PGSPAGSPTSTEEGTSESATPESGPGTSTEPSEGSAPGSPAGSPTSTEEGTSTEPSEGSAPGTSTEPSEGSAPGTSESATPESGPGSEPATSGSETPGSEPATSGSETPGSPAGSPTSTEEGTSESATPESGPGTSTEPSEGSAPGTSTEPSEGSAPGSPAGSPTSTEEGTSTEPSEGSAPGTSTEPSEGSAPGTSESATPESGPGTSTEPSEGSAPGTSESATPESGPGSEPATSGSETPGTSTEPSEGSAPGTSTEPSEGSAPGTSESATPESGPGTSESATPESGPGSPAGSPTSTEEGTSESATPESGPGSEPATSGSETPGTSESATPESGPGTSTEPSEGSAPGTSTEPSEGSAPGTSTEPSEGSAPGTSTEPSEGSAPGTSTEPSEGSAPGTSTEPSEGSAPGSPAGSPTSTEEGTSTEPSEGSAPGTSESATPESGPGSEPATSGSETPGTSESATPESGPGSEPATSGSETPGTSESATPESGPGTSTEPSEGSAPGTSESATPESGPGSPAGSPTSTEEGSPAGSPTSTEEGSPAGSPTSTEEGTSESATPESGPGTSTEPSEGSAPGTSESATPESGPGSEPATSGSETPGTSESATPESGPGSEPATSGSETPGTSESATPESGPGTSTEPSEGSAPGSPAGSPTSTEEGTSESATPESGPGSEPATSGSETPGTSESATPESGPGSPAGSPTSTEEGSPAGSPTSTEEGTSTEPSEGSAPGTSESATPESGPGTSESATPESGPGTSESATPESGPGSEPATSGSETPGSEPATSGSETPGSPAGSPTSTEEGTSTEPSEGSAPGTSTEPSEGSAPGSEPATSGSETPGTSESATPESGPGTSTEPSEGSAPGSPAGSPTSTEEGTSESATPESGPGTSTEPSEGSAPGSPAGSPTSTEEGTSTEPSEGSAPGTSTEPSEGSAPGTSESATPESGPGSEPATSGSETPGSEPATSGSETPGSPAGSPTSTEEGTSESATPESGPGTSTEPSEGSAPGTSTEPSEGSAPGSPAGSPTSTEEGTSTEPSEGSAPGTSTEPSEGSAPGTSESATPESGPGTSTEPSEGSAPGTSESATPESGPGSEPATSGSETPGTSTEPSEGSAPGTSTEPSEGSAPGTSESATPESGPGTSESATPESGPGSPAGSPTSTEEGTSESATPESGPGSEPATSGSETPGTSESATPESGPGTSTEPSEGSAPGTSTEPSEGSAPGTSTEPSEGSAPGTSTEPSEGSAPGTSTEPSEGSAPGTSTEPSEGSAPGSPAGSPTSTEEGTSTEPSEGSAPGSASR

SEQ ID NO: 336 - protein, 713 aa, Artificial Sequence
  Description of Artificial Sequence: Synthetic polypeptide
GSTSSTAESPGPGSTSSTAESPGPGSTSESPSGTAPGSTSSTAESPGPGSTSSTAESPGPGTSTPESGSASPGSTSESPSGTAPGTSPSGESSTAPGSTSESPSGTAPGSTSESPSGTAPGTSPSGESSTAPGSTSESPSGTAPGSTSESPSGTAPGTSPSGESSTAPGSTSESPSGTAPGSTSESPSGTAPGSTSESPSGTAPGTSTPESGSASPGSTSESPSGTAPGTSTPESGSASPGSTSSTAESPGPGSTSSTAESPGPGTSTPESGSASPGTSTPESGSASPGSTSESPSGTAPGTSTPESGSASPGTSTPESGSASPGSTSESPSGTAPGSTSESPSGTAPGSTSESPSGTAPGSTSSTAESPGPGTSTPESGSASPGTSTPESGSASPGSTSESPSGTAPGSTSESPSGTAPGTSTPESGSASPGSTSESPSGTAPGSTSESPSGTAPGTSTPESGSASPGTSPSGESSTAPGSTSSTAESPGPGTSPSGESSTAPGSTSSTAESPGPGTSTPESGSASPGSTSESPSGTAPGSTSSTAESPGPGTSTPESGSASPGTSTPESGSASPGSTSSTAESPGPGTSPSGESSTAPGTSTPESGSASPGSTSESPSGTAPGSTSESPSGTAPGTSTPESGSASPGTSPSGESSTAPGSTSSTAESPGPGTSPSGESSTAPGSTSSTAESPGPGSTSSTAESPGPGTSPS

SEQ ID NO: 337 - protein, 717 aa, Artificial Sequence
  Description of Artificial Sequence: Synthetic polypeptide
GSTSSTAESPGPGSTSSTAESPGPGSTSESPSGTAPGSTSSTAESPGPGSTSSTAESPGPGTSTPESGSASPGSTSESPSGTAPGTSPSGESSTAPGSTSESPSGTAPGSTSESPSGTAPGTSPSGESSTAPGSTSESPSGTAPGSTSESPSGTAPGTSPSGESSTAPGSTSESPSGTAPGSTSESPSGTAPGSTSESPSGTAPGTSTPESGSASPGSTSESPSGTAPGTSTPESGSASPGSTSSTAESPGPGSTSSTAESPGPGTSTPESGSASPGTSTPESGSASPGSTSESPSGTAPGTSTPESGSASPGTSTPESGSASPGSTSESPSGTAPGSTSESPSGTAPGSTSESPSGTAPGSTSSTAESPGPGTSTPESGSASPGTSTPESGSASPGSTSESPSGTAPGSTSESPSGTAPGTSTPESGSASPGSTSESPSGTAPGSTSESPSGTAPGTSTPESGSASPGTSPSGESSTAPGSTSSTAESPGPGTSPSGESSTAPGSTSSTAESPGPGTSTPESGSASPGSTSESPSGTAPGSTSSTAESPGPGTSTPESGSASPGTSTPESGSASPGSTSSTAESPGPGTSPSGESSTAPGTSTPESGSASPGSTSESPSGTAPGSTSESPSGTAPGTSTPESGSASPGTSPSGESSTAPGSTSSTAESPGPGTSPSGESSTAPGSTSSTAESPGPGSTSSTAESPGPGTSPSSASR

SEQ ID NO: 338 - protein, 713 aa, Artificial Sequence
  Description of Artificial Sequence: Synthetic polypeptide
GASPGTSSTGSPGSSPSASTGTGPGSSPSASTGTGPGTPGSGTASSSPGSSTPSGATGSPGSSPSASTGTGPGASPGTSSTGSPGTPGSGTASSSPGSSTPSGATGSPGTPGSGTASSSPGASPGTSSTGSPGASPGTSSTGSPGTPGSGTASSSPGSSTPSGATGSPGASPGTSSTGSPGTPGSGTASSSPGSSTPSGATGSPGSSPSASTGTGPGSSPSASTGTGPGSSTPSGATGSPGSSTPSGATGSPGASPGTSSTGSPGASPGTSSTGSPGASPGTSSTGSPGTPGSGTASSSPGASPGTSSTGSPGASPGTSSTGSPGASPGTSSTGSPGSSPSASTGTGPGTPGSGTASSSPGASPGTSSTGSPGASPGTSSTGSPGASPGTSSTGSPGSSTPSGATGSPGSSTPSGATGSPGASPGTSSTGSPGTPGSGTASSSPGSSTPSGATGSPGSSTPSGATGSPGSSTPSGATGSPGSSPSASTGTGPGASPGTSSTGSPGASPGTSSTGSPGTPGSGTASSSPGASPGTSSTGSPGASPGTSSTGSPGASPGTSSTGSPGASPGTSSTGSPGTPGSGTASSSPGSSTPSGATGSPGTPGSGTASSSPGSSTPSGATGSPGTPGSGTASSSPGSSTPSGATGSPGSSTPSGATGSPGSSPSASTGTGPGSSPSASTGTGPGASPGTSSTGSPGTPGSGTASSSPGSSTP

SEQ ID NO: 339 - protein, 717 aa, Artificial Sequence
  Description of Artificial Sequence: Synthetic polypeptide
GASPGTSSTGSPGSSPSASTGTGPGSSPSASTGTGPGTPGSGTASSSPGSSTPSGATGSPGSSPSASTGTGPGASPGTSSTGSPGTPGSGTASSSPGSSTPSGATGSPGTPGSGTASSSPGASPGTSSTGSPGASPGTSSTGSPGTPGSGTASSSPGSSTPSGATGSPGASPGTSSTGSPGTPGSGTASSSPGSSTPSGATGSPGSSPSASTGTGPGSSPSASTGTGPGSSTPSGATGSPGSSTPSGATGSPGASPGTSSTGSPGASPGTSSTGSPGASPGTSSTGSPGTPGSGTASSSPGASPGTSSTGSPGASPGTSSTGSPGASPGTSSTGSPGSSPSASTGTGPGTPGSGTASSSPGASPGTSSTGSPGASPGTSSTGSPGASPGTSSTGSPGSSTPSGATGSPGSSTPSGATGSPGASPGTSSTGSPGTPGSGTASSSPGSSTPSGATGSPGSSTPSGATGSPGSSTPSGATGSPGSSPSASTGTGPGASPGTSSTGSPGASPGTSSTGSPGTPGSGTASSSPGASPGTSSTGSPGASPGTSSTGSPGASPGTSSTGSPGASPGTSSTGSPGTPGSGTASSSPGSSTPSGATGSPGTPGSGTASSSPGSSTPSGATGSPGTPGSGTASSSPGSSTPSGATGSPGSSTPSGATGSPGSSPSASTGTGPGSSPSASTGTGPGASPGTSSTGSPGTPGSGTASSSPGSSTPSASR

SEQ ID NO: 340 - protein, 11 aa, Artificial Sequence
  Description of Artificial Sequence: Synthetic peptide
GGSPAGSCTSP

SEQ ID NO: 341 - protein, 11 aa, Artificial Sequence
  Description of Artificial Sequence: Synthetic peptide
GASASCAPSTG

SEQ ID NO: 342 - protein, 13 aa, Artificial Sequence
  Description of Artificial Sequence: Synthetic peptide
TAEAAGCGTAEAA

SEQ ID NO: 343 - protein, 11 aa, Artificial Sequence
  Description of Artificial Sequence: Synthetic peptide
GPEPTCPAPSG

SEQ ID NO: 344 - protein, 11 aa, Artificial Sequence
  Description of Artificial Sequence: Synthetic peptide
GGSPAGSKTSP

SEQ ID NO: 345 - protein, 11 aa, Artificial Sequence
  Description of Artificial Sequence: Synthetic peptide
GASASKAPSTG

SEQ ID NO: 346 - protein, 912 aa, Artificial Sequence
  Description of Artificial Sequence: Synthetic polypeptide
SAGSPTAEAAGCGTAEAAGSPAGSPTSTEEGTSESATPESGPGTSTEPSEGSAPGSPAGSPTSTEEGTSTEPSEGSAPGTSTEPSEGSAPGTSESATPESGPGSEPATSGSETPGSEPATSGSETPGSPAGSPTSTEEGTSESATPESGPGTSTEPSEGSAPGTSTEPSEGSAPGSPAGSPTSTEEGTSTEPSEGSAPGTSTEPSEGSAPGTSESATPESGPGTSTEPSEGSAPGTSESATPESGPGSEPATSGSETPGTSTEPSEGSAPGTSTEPSEGSAPGTSESATPESGPGTSESATPESGPGSPAGSPTSTEEGTSESATPESGPGSEPATSGSETPGTSESATPESGPGTSTEPSEGSAPGTSTEPSEGSAPGTSTEPSEGSAPGTSTEPSEGSAPGTSTEPSEGSAPGTSTEPSEGSAPGSPAGSPTSTEEGTSTEPSEGSAPTAEAAGCGTAEAAGTSESATPESGPGSEPATSGSETPGTSESATPESGPGSEPATSGSETPGTSESATPESGPGTSTEPSEGSAPGTSESATPESGPGSPAGSPTSTEEGSPAGSPTSTEEGSPAGSPTSTEEGTSESATPESGPGTSTEPSEGSAPGTSESATPESGPGSEPATSGSETPGTSESATPESGPGSEPATSGSETPGTSESATPESGPGTSTEPSEGSAPGSPAGSPTSTEEGTSESATPESGPGSEPATSGSETPGTSESATPESGPGSPAGSPTSTEEGSPAGSPTSTEEGTSTEPSEGSAPGTSESATPESGPGTSESATPESGPGTSESATPESGPGSEPATSGSETPGSEPATSGSETPGSPAGSPTSTEEGTSTEPSEGSAPGTSTEPSEGSAPGSEPATSGSETPGTSESATPESGPGTSTEPSEGSAPTAEAAGCGTAEAASASR

SEQ ID NO: 347 - protein, 864 aa, Artificial Sequence
  Description of Artificial Sequence: Synthetic polypeptide
SAGSPGSPAGSPTSTEEGTSESATPESGPGTSTEPSEGSAPGSPAGSPTSTEEGTSTEPSEGSAPGTSTEPSEGSAPGTSESATPESGPGSEPATSGSETPGSEPATSGSETPGSPAGSPTSTEEGTSESATPESGPGTSTEPSEGSAPGTSTEPSEGSAPGSPAGSPTSTEEGTSTEPSEGSAPGTSTEPSEGSAPGTSESATPESGPGTSTEPSEGSAPGTSESATPESGPGSEPATSGSETPGTSTEPSEGSAPGTSTEPSEGSAPGTSESATPESGPGTSESATPESGPGSPAGSPTSTEEGTSESATPESGPGSEPATSGSETPGTSESATPESGPGTSTEPSEGSAPGTSTEPSEGSAPGTSTEPSEGSAPGTSTEPSEGSAPGTSTEPSEGSAPGTSTEPSEGSAPGSPAGSPTSTEEGTSTEPSEGSAPTAEAAGCGTAEAAPGSEPATSGSETPGTSESATPESGPGSEPATSGSETPGTAEAAGCGTAEAASTEPSEGSAPGTSESATPESGPGSPAGSPTSTEEGSPATAEAAGCGTAEAASPTSTEEGTSESATPESGPGTSTEPSEGSAPGTSESATTAEAAGCGTAEAASETPGTSESATPESGPGSEPATSGSETPGTSESATPESGTAEAAGCGTAEAAGSPAGSPTSTEEGTSESATPESGPGSEPATSGSETPGTTAEAAGCGTAEAAAGSPTSTEEGSPAGSPTSTEEGTSTEPSEGSAPGTSESTAEAAGCGTAEAATPESGPGTSESATPESGPGSEPATSGSETPGSEPATSGTAEAAGCGTAEAATEEGTSTEPSEGSAPGTSTEPSEGSAPGSEPATSGSETPTAEAAGCGTAEAASASR

SEQ ID NO: 348 - protein, 432 aa, Artificial Sequence
  Description of Artificial Sequence: Synthetic polypeptide
SAGSPTAEAAGCGTAEAAGTSESATPESGPGSEPATSGSETPGTSESATPESGPGTSTEPSEGSAPGTSESATPESGPGSPAGSPTSTEEGSPAGSPTSTEEGSPAGSPTSTEEGTSESATPESGPGTSTEPSEGSAPGTSESATPESGPGSEPATSGSETPGTSESATPESGPGSEPATSGSETPGTSESATPESGPGTSTEPSEGSAPTAEAAGCGTAEAAGSPAGSPTSTEEGTSESATPESGPGSEPATSGSETPGTSESATPESGPGSPAGSPTSTEEGSPAGSPTSTEEGTSTEPSEGSAPGTSESATPESGPGTSESATPESGPGTSESATPESGPGSEPATSGSETPGSEPATSGSETPGSPAGSPTSTEEGTSTEPSEGSAPGTSTEPSEGSAPGSEPATSGSETPTAEAAGCGTAEAASASR

SEQ ID NO: 349 - protein, 432 aa, Artificial Sequence
  Description of Artificial Sequence: Synthetic polypeptide
SAGSPTAEAAGCGTAEAAPGSEPATSGSETPGTSESATPESGPGSEPATSGSETPGTAEAAGCGTAEAASTEPSEGSAPGTSESATPESGPGSPAGSPTSTEEGSPATAEAAGCGTAEAASPTSTEEGTSESATPESGPGTSTEPSEGSAPGTSESATTAEAAGCGTAEAASETPGTSESATPESGPGSEPATSGSETPGTSESATPESGTAEAAGCGTAEAAGSPAGSPTSTEEGTSESATPESGPGSEPATSGSETPGTTAEAAGCGTAEAAAGSPTSTEEGSPAGSPTSTEEGTSTEPSEGSAPGTSESTAEAAGCGTAEAATPESGPGTSESATPESGPGSEPATSGSETPGSEPATSGTAEAAGCGTAEAATEEGTSTEPSEGSAPGTSTEPSEGSAPGSEPATSGSETPTAEAAGCGTAEAASASR

SEQ ID NO: 350 - protein, 886 aa, Artificial Sequence
  Description of Artificial Sequence: Synthetic polypeptide
SAGSPTAEAAGCGTAEAAGSPAGSPTSTEEGTSESATPESGPGTSTEPSEGSAPGSPAGSPTSTEEGTSTEPSEGSAPGTSTEPSEGSAPGTSESATPESGPGSEPATSGSETPGSEPATSGSETPGSPAGSPTSTEEGTSESATPESGPGTSTEPSEGSAPGTSTEPSEGSAPGSPAGSPTSTEEGTSTEPSEGSAPGTSTEPSEGSAPGTSESATPESGPGTSTEPSEGSAPGTSESATPESGPGSEPATSGSETPGTSTEPSEGSAPGTSTEPSEGSAPGTSESATPESGPGTSESATPESGPGSPAGSPTSTEEGTSESATPESGPGSEPATSGSETPGTSESATPESGPGTSTEPSEGSAPGTSTEPSEGSAPGTSTEPSEGSAPGTSTEPSEGSAPGTSTEPSEGSAPGTSTEPSEGSAPGSPAGSPTSTEEGTSTEPSEGSAPGTSESATPESGPGSEPATSGSETPGTSESATPESGPGSEPATSGSETPGTSESATPESGPGTSTEPSEGSAPGTSESATPESGPGSPAGSPTSTEEGSPAGSPTSTEEGSPAGSPTSTEEGTSESATPESGPGTSTEPSEGSAPGTSESATPESGPGSEPATSGSETPGTSESATPESGPGSEPATSGSETPGTSESATPESGPGTSTEPSEGSAPGSPAGSPTSTEEGTSESATPESGPGSEPATSGSETPGTSESATPESGPGSPAGSPTSTEEGSPAGSPTSTEEGTSTEPSEGSAPGTSESATPESGPGTSESATPESGPGTSESATPESGPGSEPATSGSETPGSEPATSGSETPGSPAGSPTSTEEGTSTEPSEGSAPGTSTEPSEGSAPGSEPATSGSETPGTSESATPESGPGTSTEPSEGSAPSASR

SEQ ID NO: 351 - protein, 144 aa, Artificial Sequence
  Description of Artificial Sequence: Synthetic polypeptide
SAGSPTEGTSTEPSEGSAPGTSESTAEAAGCGTAEAATPESGPGTSESATPESGPGSEPATSGSETPGSEPATSGTAEAAGCGTAEAATEEGTSTEPSEGSAPGTSTEPSEGSAPGSEPATSGSETPTAEAAGCGTAEAASASR

SEQ ID NO: 352 - protein, 432 aa, Artificial Sequence
  Description of Artificial Sequence: Synthetic polypeptide
SAGSPTPGTSESATPESGPGSEPATSGSETPGTSESATPESGPGSEPATSGSETPGTSESATPESGPGTSTEPSEGSAPGTSESATPESGPGSPAGSPTSTEEGSPAGSPTSTEEGSPAGSPTSTEEGTSESATPESGPGTSTEPSEGSAPGTSESATPESGPGSEPATSGSETPGTSESATPESGPGSEPATSGSETPGTSESATPESGPGTSTEPSEGSAPGSPAGSPTSTEEGTSESATPESGPGSEPATSGSETPGTSESATPESGPGSPAGSPTSTEEGSPAGSPTSTEEGTSTEPSEGSAPGTSESATPESGPGTSESATPESGPGTSESATPESGPGSEPATSGSETPGSEPATSGSETPGSPAGSPTSTEEGTSTEPSEGSAPGTSTEPSEGSAPGSEPATSGSETPTAEAAGCGTAEAASASR

SEQ ID NO: 353 - protein, 432 aa, Artificial Sequence
  Description of Artificial Sequence: Synthetic polypeptide
SAGSPTGSEPATSGSETPGTSESATPESGPGSEPATSGSETPGTSESATPESGPGTSTEPSEGSAPGTSESATPESGPGSPAGSPTSTEEGSPAGSPTSTEEGSPAGSPTSTEEGTSESATPESGPGTSTEPSEGSAPGTSESATPESGPGSEPATSGSETPGTSESATPESGPGSEPATSGSETPGTSESATPESGPGTSTEPSEGSAPTAEAAGCGTAEAAGSPAGSPTSTEEGTSESATPESGPGSEPATSGSETPGTSESATPESGPGSPAGSPTSTEEGSPAGSPTSTEEGTSTEPSEGSAPGTSESTAEAAGCGTAEAATPESGPGTSESATPESGPGSEPATSGSETPGSEPATSGSETPGSPAGSPTSTEEGTSTEPSEGSAPGTSTEPSEGSAPGSEPATSGSETPTAEAAGCGTAEAASASR

SEQ ID NO: 354 - protein, 432 aa, Artificial Sequence
  Description of Artificial Sequence: Synthetic polypeptide
SAGSPTPGTSESATPESGPGSEPATSGSETPGTSESATPESGPGSEPATSGSETPGTSESATPESGPGTSTEPSEGSAPGTSESATPESGPGSPAGSPTSTEEGSPAGSPTSTEEGSPAGSPTSTEEGTSESATPESGPGTSTEPSEGSAPGTSESATPESGPGSEPATSGSETPGTSESATPESGPGSEPATSGSETPGTSESATPESGPGTSTEPSEGSAPGSPAGSPTSTEEGTSESATPESGPGSEPATSGSETPGTSESATPESGPGSPAGSPTSTEEGSPAGSPTSTEEGTSTEPSEGSAPGTSESTAEAAGCGTAEAATPESGPGTSESATPESGPGSEPATSGSETPGSEPATSGTAEAAGCGTAEAATEEGTSTEPSEGSAPGTSTEPSEGSAPGSEPATSGSETPTAEAAGCGTAEAASASR

SEQ ID NO: 355 - protein, 144 aa, Artificial Sequence
  Description of Artificial Sequence: Synthetic polypeptide
SAGSPGSTSSTAESPGPGSTSSTAESPGPGCTSESPSGTAPGSTSSTAESPGPGSTSSTAESPGPGTSTPESGSASPGSTSCSPSGEAPGTSPSGESSTAPGSTSESPSGTAPGSTSESPSGTAPETSPSGESCTAPGSTSASR

SEQ ID NO: 356 - protein, 144 aa, Artificial Sequence
  Description of Artificial Sequence: Synthetic polypeptide
SAGSPGTPGSGTASSSPGSSTPSGATGSPGCAGSGTASSSPGSSTPSGATGSPGTPGSGTASSSPGSSTPSGATGSPGSSTCSGATGSPGSSPSASTGTGPGSSPSASTGTGPGASPGTSSTGSPGTPGSGTACSSPGSSSASR

SEQ ID NO: 357 - protein, 864 aa, Artificial Sequence
  Description of Artificial Sequence: Synthetic polypeptide
SAGSPGSPAGSPTSTEEGTSESATPESGPGTSTEPSEGSAPGSPAGSPTSTEEGTSTEPSEGSAPGTSTEPSEGSAPGTSESATPESGPGSEPATSGSETPGSEPATSGSETPGSPAGSPTSTEEGTSESATPESGPGTSTEPSEGSAPGTSTEPSEGSAPGSPAGSPTSTEEGTSTEPSEGSAPGTSTEPSEGSAPGTSESATPESGPGTSTEPSEGSAPGTSESATPESGPGSEPATSGSETPGTSTEPSEGSAPGTSTEPSEGSAPGTSESATPESGPGTSESATPESGPGSPAGSPTSTEEGTSESATPESGPGSEPATSGSETPGTSESATPESGPGTSTEPSEGSAPGTSTEPSEGSAPGTSTEPSEGSAPGTSTEPSEGSAPGTSTEPSEGSAPGTSTEPSEGSAPGSPAGSPTSTEEGTSTEPSEGSAPGTSESATPESGPGSEPATSGSETPGTSESATPESGPGSEPATSGSETPGTSESATPESGPGTSTEPSEGSAPGTSESATPESGPGSPAGSPTSTEEGSPAGSPTSTEEGSPAGSPTSTEEGTSESATPESGPGTSTEPSEGSAPGTSESATPESGPGSEPATSGSETPGTSESATPESGPGSEPATSGSETPGTSESATPESGPGTSTEPSEGSAPGSPAGSPTSTEEGTSESATPESGPGSEPATSGSETPGTSESATPESGPGSPAGSPTSTEEGSPAGSPTSTEEGTSTEPSEGSAPGTSESATPESGPGTSESATPESGPGTSESATPESGPGSEPATSGSETPGSEPATSGSETPGSPAGSPTSTEEGTSTEPSEGSAPGTSTEPSEGSAPGSEPATSGSETPGTSESATPESGPGTESASK

SEQ ID NO: 358 - protein, 288 aa, Artificial Sequence
  Description of Artificial Sequence: Synthetic polypeptide
SAGSPTGPGSEPATSGSETPGTSESATPESGPGSEPATSGSETPGTSESATPESGPGTSTEPSEGSAPGSPAGSPTSTEEGTSESATPESGPGSEPATSGSETPGTSESATPESGPGSPAGSPTSTEEGSPAGSPTSTEEGTSTEPSEGSAPGTSESATPESGPGTSESATPESGPGTSESATPESGPGSEPATSGSETPGSEPATSGSETPGSPAGSPTSTEEGTSTEPSEGSAPGTSTEPSEGSAPGSEPATSGSETPGTSESATPESGPGTSTACSEGSAPSASR

SEQ ID NO: 359 - protein, 288 aa, Artificial Sequence
  Description of Artificial Sequence: Synthetic polypeptide
SAGSPTGPGSEPATSGSETPGTSESATPESGPGSEPATSGSETPGTSESATPESGPGTSTEPSEGSAPGSPAGSPTSTEEGTSESATPESGPGSEPATSGSETPGTSESATPESGPGSPAGSPTSTEEGSPAGSPTSTEEGTSTEPSEGSAPGTSESATPESGPGTSESATPESGPGTSESATPESGPGSEPATSGSETPGSEPATSGSETPGSPAGSPTSTEEGTSTEPSEGSAPGTSTEPSEGSAPGSEPATSGSETPGTSESATPESGPGTSTEPSEGSCASASR

SEQ ID NO: 360 - protein, 144 aa, Artificial Sequence
  Description of Artificial Sequence: Synthetic polypeptide
SAGSPGSCAGSPTSTEEGTSESACPESGPGTSTEPSEGSCPGSPAGSPTSTEEGTCTEPSEGSAPGTSTEPCSGSAPGTSESATPESCPGSEPATSGSETPGSCPATSGSETPGSPAGSCTSTEEGTSESATPESCPGTESASR

SEQ ID NO: 361 - protein, 288 aa, Artificial Sequence
  Description of Artificial Sequence: Synthetic polypeptide
SAGSPTGCGSEPATSGSETPGTSESATPESGPGSEPATSGSETPGTSESATPESGPGTSTEPSEGSAPGSPAGSPTSTEEGTSESATPESGPGSEPATSGSETPGTSESATPESGPGSPAGSPTSTEEGSPAGSPTSTEEGTSCTPSEGSAPGTSESATPESGPGTSESATPESGPGTSESATPESGPGSEPATSGSETPGSEPATSGSETPGSPAGSPTSTEEGTSTEPSEGSAPGTSTEPSEGSAPGSEPATSGSETPGTSESATPESGPGTSTEPSCGSAPSASR

SEQ ID NO: 362 - protein, 288 aa, Artificial Sequence
  Description of Artificial Sequence: Synthetic polypeptide
SAGSPTGCGSEPATSGSETPGTSESATPESGPGSEPATSGSCTPGTSESATPESGPGTSTEPSEGSAPGSPAGSPCSTEEGTSESATPESGPGSEPATSGSETPGTSESCTPESGPGSPAGSPTSTEEGSPAGSPTSTEEGTSCTPSEGSAPGTSESATPESGPGTSESATPESGPGCSESATPESGPGSEPATSGSETPGSEPATSGSETCGSPAGSPTSTEEGTSTEPSEGSAPGTSTEPSEGCAPGSEPATSGSETPGTSESATPESGPGTSTEPSCGSAPSASR

SEQ ID NO: 363 - protein, 432 aa, Artificial Sequence
  Description of Artificial Sequence: Synthetic polypeptide
SAGSPTGSEPATSGSETPGTSESATPESGPGSEPATSGSETPGTSESATPESGPGTSTEPSEGSAPGTSESATPESGPGSPAGSPTSTEEGSPAGSPTSTEEGSPAGSPTSTEEGTSESATPESGPGTSTEPSEGSAPGTSESATPESGPGSEPATSGSETPGTSESATPESGPGSEPATSGSETPGTSESATPESGPGTSTEPSEGSAPTAEAAGCGTAEAAGSPAGSPTSTEEGTSESATPESGPGSEPATSGSETPGTSESATPESGPGSPAGSPTSTEEGSPAGSPTSTEEGTSTEPSEGSAPGTSESATPESGPGTSESATPESGPGTSESATPESGPGSEPATSGSETPGSEPATSGSETPGSPAGSPTSTEEGTSTEPSEGSAPGTSTEPSEGSAPGSEPATSGSETPGTSESATPESGPGSASR

SEQ ID NO: 364 - protein, 144 aa, Artificial Sequence
  Description of Artificial Sequence: Synthetic polypeptide
SAGSPGAPGTSESATPESGPGTSESATPESGPGTSESATPESGPGSEPATSGSETPGSEPATSGSETPGSPAGSPTSTEEGTSTEPSEGSAPGTSTEPSEGSAPGSEPATSGSETPGTSESATPESGPGTSTEPSEGSCASASR

SEQ ID NO: 365 - protein, 864 aa, Artificial Sequence
  Description of Artificial Sequence: Synthetic polypeptide
SAGSPTAEAAGCGTAEAATSESATPESGPGTSTEPSEGSAPGSPAGSPTSTEEGTSTEPSEGSAPGTSTEPSEGSAPGTSESATPESGPGSEPATSGSETPGSEPATSGSETPGSPAGSPTSTEEGTSESATPESGPGTSTEPSEGSAPGTSTEPSEGSAPGSPAGSPTSTEEGTSTEPSEGSAPGTSTEPSEGSAPGTSESATPESGPGTSTEPSEGSAPGTSESATPESGPGSEPATSGSETPGTSTEPSEGSAPGTSTEPSEGSAPGTSESATPESGPGTSESATPESGPGSPAGSPTSTEEGTSESATPESGPGSEPATSGSETPGTSESATPESGPGTSTEPSEGSAPGTSTEPSEGSAPGTSTEPSEGSAPGTSTEPSEGSAPGTSTEPSEGSAPGTSTEPSEGSAPGSPAGSPTSTEEGTSTEPSEGSAPGTSESATPESGPGSEPATSGSETPGTSESATPESGPGSEPATSGSETPGTSESATPESGPGTSTEPSEGSAPGTSESATPESGPGSPAGSPTSTEEGSPAGSPTSTEEGSPAGSPTSTEEGTSESATPESGPGTSTEPSEGSAPGTSESATPESGPGSEPATSGSETPGTSESATPESGPGSEPATSGSETPGTSESATPESGPGTSTEPSEGSAPGSPAGSPTSTEEGTSESATPESGPGSEPATSGSETPGTSESATPESGPGSPAGSPTSTEEGSPAGSPTSTEEGTSTEPSEGSAPGTSESATPESGPGTSESATPESGPGTSESATPESGPGSEPATSGSETPGSEPATSGSETPGSPAGSPTSTEEGTSTEPSEGSAPGTSTEPSEGSAPGSEPATSGSETPGTSESATPESGPGTESASR

SEQ ID NO: 366 - protein, 864 aa, Artificial Sequence
  Description of Artificial Sequence: Synthetic polypeptide
SAGSPGSPAGSPTSTEEGTSESATPESGPGTSTEPSEGSAPGSPAGSPTSTEEGTSTEPSEGSAPGTSTEPSEGSAPGTSESATPESGPGSEPATSGSETPGSEPATSGSETPGSPAGSPTSTEEGTSESATPESGPGTSTEPSEGSAPGTSTEPSEGSAPGSPAGSPTSTEEGTSTEPSEGSAPGTSTEPSEGSAPGTSESATPESGPGTSTEPSEGSAPGTSESATPESGPGSEPATSGSETPGTSTEPSEGSAPGTSTEPSEGSAPGTSESATPESGPGTSESATPESGPGSPAGSPTSTEEGTSESATPESGPGSEPATSGSETPGTSESATPESGPGTSTEPSEGSAPGTSTEPSEGSAPGTSTEPSEGSAPGTSTEPSEGSAPGTSTEPSEGSAPGTSTEPSEGSAPGSPAGSPTSTEEGTSTEPSEGSAPGTSESATPESGPGSEPATSGSETPGTSESATPESGPGSEPATSGSETPGTSESATPESGPGTSTEPSEGSAPGTSESATPESGPGSPAGSPTSTEEGSPAGSPTSTEEGSPAGSPTSTEEGTSESATPESGPGTSTEPSEGSAPGTSESATPESGPGSEPATSGSETPGTSESATPESGPGSEPATSGSETPGTSESATPESGPGTSTEPSEGSAPGSPAGSPTSTEEGTSESATPESGPGSEPATSGSETPGTSESATPESGPGSPAGSPTSTEEGSPAGSPTSTEEGTSTEPSEGSAPGTSESATPESGPGTSESATPESGPGTSESATPESGPGSEPATSGSETPGSEPATSGSETPGSPAGSPTSTEEGTSTEPSEGSAPGTSTEPSEGSAPGSEPATSGSETPGSTAEAAGCGTAEAASASR

SEQ ID NO: 367 - protein, 864 aa, Artificial Sequence
  Description of Artificial Sequence: Synthetic polypeptide
SAGSPTAEAAGCGTAEAATSESATPESGPGTSTEPSEGSAPGSPAGSPTSTEEGTSTEPSEGSAPGTSTEPSEGSAPGTSESATPESGPGSEPATSGSETPGSEPATSGSETPGSPAGSPTSTEEGTSESATPESGPGTSTEPSEGSAPGTSTEPSEGSAPGSPAGSPTSTEEGTSTEPSEGSAPGTSTEPSEGSAPGTSESATPESGPGTSTEPSEGSAPGTSESATPESGPGSEPATSGSETPGTSTEPSEGSAPGTSTEPSEGSAPGTSESATPESGPGTSESATPESGPGSPAGSPTSTEEGTSESATPESGPGSEPATSGSETPGTSESATPESGPGTSTEPSEGSAPGTSTEPSEGSAPGTSTEPSEGSAPGTSTEPSEGSAPGTSTEPSEGSAPGTSTEPSEGSAPGSPAGSPTSTEETAEAAGCGTAEAATSESATPESGPGSEPATSGSETPGTSESATPESGPGSEPATSGSETPGTSESATPESGPGTSTEPSEGSAPGTSESATPESGPGSPAGSPTSTEEGSPAGSPTSTEEGSPAGSPTSTEEGTSESATPESGPGTSTEPSEGSAPGTSESATPESGPGSEPATSGSETPGTSESATPESGPGSEPATSGSETPGTSESATPESGPGTSTEPSEGSAPGSPAGSPTSTEEGTSESATPESGPGSEPATSGSETPGTSESATPESGPGSPAGSPTSTEEGSPAGSPTSTEEGTSTEPSEGSAPGTSESATPESGPGTSESATPESGPGTSESATPESGPGSEPATSGSETPGSEPATSGSETPGSPAGSPTSTEEGTSTEPSEGSAPGTSTEPSEGSAPGSEPATSGSETPGSTAEAAGCGTAEAASASR

SEQ ID NO: 368 - protein, 432 aa, Artificial Sequence
  Description of Artificial Sequence: Synthetic polypeptide
SAGSPTGSEPATSGSETPGTSESATPESGPGSEPATSGSETPGTSESATPESGPGTSTEPSEGSAPGTSESATPESGPGSPAGSPTSTEEGSPAGSPTSTEEGSPAGSPTSTEEGTSESATPESGPGTSTEPSEGSAPGTSESATPESGPGSEPATSGSETPGTSESATPESGPGSEPATSGSETPGTSESATPESGPGTSTEPSEGSAPTAEAAGCGTAEAAGSPAGSPTSTEEGTSESATPESGPGSEPATSGSETPGTSESATPESGPGSPAGSPTSTEEGSPAGSPTSTEEGTSTEPSEGSAPGTSESATPESGPGTSESATPESGPGTSESATPESGPGSEPATSGSETPGSEPATSGSETPGSPAGSPTSTEEGTSTEPSEGSAPGTSTEPSEGSAPGSEPATSGSETPTAEAAGCGTAEAASASR

SEQ ID NO: 369 - protein, 576 aa, Artificial Sequence
  Description of Artificial Sequence: Synthetic polypeptide
ATAEAAGCGTAEAAGSPAGSPTSTEEGTSESATPESGPGTSTEPSEGSAPGSPAGSPTSTEEGTSTEPSEGSAPGTSTEPSEGSAPGTSESATPESGPGSEPATSGSETPGSEPATSGSETPGSPAGSPTSTEEGTSESATPESGPGTSTEPSEGSAPGTSTEPSEGSAPGSPAGSPTSTEEGTSTEPSEGSAPGTSTEPSEGSAPGTSESATPESGPGTSTEPSEGSAPGTSESATPESGPGSEPATSGSETPGTSTEPSEGSAPGTSTEPSEGSAPGTSESATPESGPGTSESATPESGPGSPAGSPTSTEEGTSESATPESGPGSEPATSGSETPGTSESATPESGPGTSTEPSEGSAPGTSTEPSEGSAPGTSTEPSEGSAPGTSTEPSEGSAPGTSTEPSEGSAPGTSTEPSEGSAPGSPAGSPTSTEEGTSTEPSEGSAPGTSESATPESGPGSEPATSGSETPGTSESATPESGPGSEPATSGSETPGTSESATPESGPGTSTEPSEGSAPGTSESATPESGPGSPAGSPTSTEEGSPAGSPTSTEEGSPAGSPTSTEEGTSESASASR

SEQ ID NO: 370 - protein, 864 aa, Artificial Sequence
  Description of Artificial Sequence: Synthetic polypeptide
SAGSPGSPAGSPTSTENLYFQSATPESGPGTSTEPSEGSAPGSPAGSPTSTEEGTSTEPSEGSAPGTSTEPSEGSAPGTSESATPESGPGSEPATSGSETPGSEPATSGSETPGSPAGSPTSTEEGTSESATPESGPGTSTEPSEGSAPGTSTEPSEGSAPGSPAGSPTSTEEGTSTEPSEGSAPGTSTEPSEGSAPGTSESATPESGPGTSTEPSEGSAPGTSESATPESGPGSEPATSGSETPGTSTEPSEGSAPGTSTEPSEGSAPGTSESATPESGPGTSESATPESGPGSPAGSPTSTEEGTSESATPESGPGSEPATSGSETPGTSESATPESGPGTSTEPSEGSAPGTSTEPSEGSAPGTSTEPSEGSAPGTSTEPSEGSAPGTSTEPSEGSAPGTSTEPSEGSAPGSPAGSPTSTEEGTSTEPSEGSAPGTSESATPESGPGSEPATSGSETPGTSESATPESGPGSEPATSGSETPGTSESATPESGPGTSTEPSEGSAPGTSESATPESGPGSPAGSPTSTEEGSPAGSPTSTEEGSPAGSPTSTEEGTSESATPESGPGTSTEPSEGSAPGTSESATPESGPGSEPATSGSETPGTSESATPESGPGSEPATSGSETPGTSESATPESGPGTSTEPSEGSAPGSPAGSPTSTEEGTSESATPESGPGSEPATSGSETPGTSESATPESGPGSPAGSPTSTEEGSPAGSPTSTEEGTSTEPSEGSAPGTSESATPESGPGTSESATPESGPGTSESATPESGPGSEPATSGSETPGSEPATSGSETPGSPAGSPTSTEEGTSTEPSEGSAPGTSTEPSEGSAPGSEPATSGSETPGSTAEAAGCGTAEAASASR

SEQ ID NO: 371 - protein, 864 aa, Artificial Sequence
  Description of Artificial Sequence: Synthetic polypeptide
SACSPGSPAGSPTSTEEGTSESATPESGPGTSTEPSEGSAPGSPAGSPTSTEEGTSTEPSEGSAPGTSTEPSEGSAPGTSESATPESGPGSEPATSGSETPGSEPATSGSETPGSPAGSPTSTEEGTSESATPESGPGTSTEPSEGSAPGTSTEPSEGSAPGSPAGSPTSTEEGTSTEPSEGSAPGTSTEPSEGSAPGTSESATPESGPGTSTEPSEGSAPGTSESATPESGPGSEPATSGSETPGTSTEPSEGSAPGTSTEPSEGSAPGTSESATPESGPGTSESATPESGPGSPAGSPTSTEEGTSESATPESGPGSEPATSGSETPGTSESATPESGPGTSTEPSEGSAPGTSTEPSEGSAPGTSTEPSEGSAPGTSTEPSEGSAPGTSTEPSEGSAPGTSTEPSEGSAPGSPAGSPTSTEEGTSTEPSEGSAPGTSESATPESGPGSEPATSGSETPGTSESATPESGPGSEPATSGSETPGTSESATPESGPGTSTEPSEGSAPGTSESATPESGPGSPAGSPTSTEEGSPAGSPTSTEEGSPAGSPTSTEEGTSESATPESGPGTSTEPSEGSAPGTSESATPESGPGSEPATSGSETPGTSESATPESGPGSEPATSGSETPGTSESATPESGPGTSTEPSEGSAPGSPAGSPTSTEEGTSESATPESGPGSEPATSGSETPGTSESATPESGPGSPAGSPTSTEEGSPAGSPTSTEEGTSTEPSEGSAPGTSESATPESGPGTSESATPESGPGTSESATPESGPGSEPATSGSETPGSEPATSGSETPGSPAGSPTSTEEGTSTEPSEGSAPGTSTEPSEGSAPGSEPATSGSETPGTSESATPESGPGTCSASR

SEQ ID NO: 372 - protein, 864 aa, Artificial Sequence
  Description of Artificial Sequence: Synthetic polypeptide
SAGSPGSPAGSPTSTEEGTSESATPESGPGTSTEPSEGSAPGSPAGSPTSTEEGTSTEPSEGSAPGTSTEPSEGSAPGTSESATPESGPGSEPATSGSETPGSEPATSGSETPGSPAGSPTSTEEGTSESATPESGPGTSTEPSEGSAPGTSTEPSEGSAPGSPAGSPTSTEEGTSTEPSEGSAPGTSTEPSEGSAPGTSESATPESGPGTSTEPSEGSAPGTSESATPESGPGSEPATSGSETPGTSTEPSEGSAPGTSTEPSEGSAPGTSESATPESGPGTSESATPESGPGSPAGSPTSTEEGTSESATPESGPGSEPATSGSETPGTSESATPESGPGTSTEPSEGSAPGTSTEPSEGSAPGTSTEPSEGSAPGTSTEPSEGSAPGTSTEPSEGSAPGTSTEPSEGSAPGSPAGSPTSTEEGTSTEPSEGSAPGTSESATPESGPGSEPATSGSETPGTSESATPESGPGSEPATSGSETPGTSESATPESGPGTSTEPSEGSAPGTSESATPESGPGSPAGSPTSTEEGSPAGSPTSTEEGSPAGSPTSTEEGTSESATPESGPGTSTEPSEGSAPGTSESATPESGPGSEPATSGSETPGTSESATPESGPGSEPATSGSETPGTSESATPESGPGTSTEPSEGSAPGSPAGSPTSTEEGTSESATPESGPGSEPATSGSETPGTSESATPESGPGSPAGSPTSTEEGSPAGSPTSTEEGTSTEPSEGSAPGTSESATPESGPGTSESATPESGPGTSESATPESGPGSEPATSGSETPGSEPATSGSETPGSPAGSPTSTEEGTSTEPSEGSAPGTSTEPSEGSAPGSEPATCGSETPGTSESATPESGPGTCSASR

SEQ ID NO: 373 - protein, 144 aa, Artificial Sequence
  Description of Artificial Sequence: Synthetic polypeptide
SAGSPGSCAGSPTSTEEGTSESACSPEGPGTSTEPSEGSCGPSPAGSPTSTEEGTCTEPSEGSAPGTSEPTCSGSAPGTSESATPESCGPSEPATSGSETPGSCAPTSGSETPGSPAGSCTSTEEGTSESATPESCGPTESASR

SEQ ID NO: 374 - protein, 144 aa, Artificial Sequence
  Description of Artificial Sequence: Synthetic polypeptide
SAGSPGSCSSTAESPGPGSTSSTCSEPGPGSTSESPSGTCGPSTSSTAESPGPGSCSSTAESPGPGTSPETCGSASPGSTSESPSGTCGPTSPSGESSTAPGSCSESPSGTAPGSTSESCSGTAPETSPSGESSTCGPSTSASR

SEQ ID NO: 375 - protein, 144 aa, Artificial Sequence
  Description of Artificial Sequence: Synthetic polypeptide
SAGSPGSPAGSPTSTEEGTSESATPESGPGTSTEPSEGSAPGSPAGSPTSTEEGTSTEPSEGSAPGTSTEPSEGSAPGTSESATPESGPGSEPATSGSETPGSEPATSGSETPGSPAGSPTSTEEGTSESATPESGPGTESASK

SEQ ID NO: 376 - protein, 288 aa, Artificial Sequence
  Description of Artificial Sequence: Synthetic polypeptide
SAGSPTGPGSEPATSGSETPGTSESATPESGPGSEPATSGSETPGTSESATPESGPGTSTEPSEGSAPGSPAGSPTSTEEGTSESATPESGPGSEPATSGSETPGTSESATPESGPGSPAGSPTSTEEGSPAGSPTSTEEGTSTEPSEGSAPGTSESATPESGPGTSESATPESGPGTSESATPESGPGSEPATSGSETPGSEPATSGSETPGSPAGSPTSTEEGTSTEPSEGSAPGTSTEPSEGSAPGSEPATSGSETPGTSESATPESGPGTSTEPSEGSAPSASK

SEQ ID NO: 377 - protein, 216 aa, Artificial Sequence
  Description of Artificial Sequence: Synthetic polypeptide
SAGSPTGTSESATPESGPGTSTEPSEGSAPGTSESATPESGPGSEPATSGSETPGTSESATPESGPGSEPATSGSETPGTSESATPESGPGTSTEPSEGSAPTAEAAGCGTAEAAGSPAGSPTSTEEGTSESATPESGPGSEPATSGSETPGTSESATPESGPGSPAGSPTSTEEGSPAGSPTSTEEGTSTEPSEGSAPGTSESATPESGPGSASR

SEQ ID NO: 378 - protein, 288 aa, Artificial Sequence
  Description of Artificial Sequence: Synthetic polypeptide
SAGSPTGSPAGSPTSTEEGSPAGSPTSTEEGSPAGSPTSTEEGTSESATPESGPGTSTEPSEGSAPGTSESATPESGPGSEPATSGSETPGTSESATPESGPGSEPATSGSETPGTSESATPESGPGTSTEPSEGSAPTAEAAGCGTAEAAGSPAGSPTSTEEGTSESATPESGPGSEPATSGSETPGTSESATPESGPGSPAGSPTSTEEGSPAGSPTSTEEGTSTEPSEGSAPGTSESATPESGPGTSESATPESGPGTSESATPESGPGSEPATSGSETPGSASR

SEQ ID NO: 379 - protein, 874 aa, Artificial Sequence
  Description of Artificial Sequence: Synthetic polypeptide
SAGSPGSCAGSPTSTENLYFQSATPESGPGTSTEPSEGSAPGSPAGSPTSTEEGTSTEPSEGSAPGTSTEPSEGSAPGTSESATPESGPGSEPATSGSETPGSEPATSGSETPGSPAGSPTSTEEGTSESATPESGPGTSTEPSEGSAPGTSTEPSEGSAPGSPAGSPTSTEEGTSTEPSEGSAPGTSTEPSEGSAPGTSESATPESGPGTSTEPSEGSAPGTSESATPESGPGSEPATSGSETPGTSTEPSEGSAPGTSTEPSEGSAPGTSESATPESGPGTSESATPESGPGSPAGSPTSTEEGTSESATPESGPGSEPATSGSETPGTSESATPESGPGTSTEPSEGSAPGTSTEPSEGSAPGTSTEPSEGSAPGTSTEPSEGSAPGTSTEPSEGSAPGTSTEPSEGSAPGSPAGSPTSTEEGTSTEPSEGSAPGTSESATPESGPGSEPATSGSETPGTSESATPESGPGSEPATSGSETPGTSESATPESGPGTSTEPSEGSAPGTSESATPESGPGSPAGSPTSTEEGSPAGSPTSTEEGSPAGSPTSTEEGTSESATPESGPGTSTEPSEGSAPGTSESATPESGPGSEPATSGSETPGTSESATPESGPGSEPATSGSETPGTSESATPESGPGTSTEPSEGSAPGSPAGSPTSTEEGTSESATPESGPGSEPATSGSETPGTSESATPESGPGSPAGSPTSTEEGSPAGSPTSTEEGTSTEPSEGSAPGTSESATPESGPGTSESATPESGPGTSESATPESGPGSEPATSGSETPGSEPATSGSETPGSPAGSPTSTEEGTSTEPSEGSAPGTSTEPSEGSAPGSEPATSGSETPGTSESATPESGPGTESASPSAHHHHHHHH

SEQ ID NO: 380 - protein, 648 aa, Artificial Sequence
  Description of Artificial Sequence: Synthetic polypeptide
SAGSPGTSESATPESGPGSEPATSGSETPGTSTEPSEGSAPGTSTEPSEGSAPGTSESATPESGPGTSESATPESGPGSPAGSPTSTEEGTSESATPESGPGSEPATSGSETPGTSESATPESGPGTSTEPSEGSAPGTSTEPSEGSAPGTSTEPSEGSAPGTSTEPSEGSAPGTSTEPSEGSAPGTSTEPSEGSAPGSPAGSPTSTEEGTSTEPSEGSAPGTSESATPESGPGSEPATSGSETPGTSESATPESGPGSEPATSGSETPGTSESATPESGPGTSTEPSEGSAPGTSESATPESGPGSPAGSPTSTEEGSPAGSPTSTEEGSPAGSPTSTEEGTSESATPESGPGTSTEPSEGSAPGTSESATPESGPGSEPATSGSETPGTSESATPESGPGSEPATSGSETPGTSESATPESGPGTSTEPSEGSAPGSPAGSPTSTEEGTSESATPESGPGSEPATSGSETPGTSESATPESGPGSPAGSPTSTEEGSPAGSPTSTEEGTSTEPSEGSAPGTSESATPESGPGTSESATPESGPGTSESATPESGPGSEPATSGSETPGSEPATSGSETPGSPAGSPTSTEEGTSTEPSEGSAPGTSTEPSEGSAPGSEPATSGSETPGSTAEAAGCGTAEAASASR

SEQ ID NO: 381 - protein, 864 aa, Artificial Sequence
  Description of Artificial Sequence: Synthetic polypeptide
GSPGAGSPAGSPTSTEEGTSESATPESGPGTSTEPSEGSAPGSPAGSPTSTEEGTSTEPSEGSAPGTSTEPSEGSAPGTSESATPESGPGSEPATSGSETPGSEPATSGSETPGSPAGSPTSTEEGTSESATPESGPGTSTEPSEGSAPGTSTEPSEGSAPGSPAGSPTSTEEGTSTEPSEGSAPGTSTEPSEGSAPGTSESATPESGPGTSTEPSEGSAPGTSESATPESGPGSEPATSGSETPGTSTEPSEGSAPGTSTEPSEGSAPGTSESATPESGPGTSESATPESGPGSPAGSPTSTEEGTSESATPESGPGSEPATSGSETPGTSESATPESGPGTSTEPSEGSAPGTSTEPSEGSAPGTSTEPSEGSAPGTSTEPSEGSAPGTSTEPSEGSAPGTSTEPSEGSAPGSPAGSPTSTEEGTSTEPSEGSAPGTSESATPESGPGSEPATSGSETPGTSESATPESGPGSEPATSGSETPGTSESATPESGPGTSTEPSEGSAPGTSESATPESGPGSPAGSPTSTEEGSPAGSPTSTEEGSPAGSPTSTEEGTSESATPESGPGTSTEPSEGSAPGTSESATPESGPGSEPATSGSETPGTSESATPESGPGSEPATSGSETPGTSESATPESGPGTSTEPSEGSAPGSPAGSPTSTEEGTSESATPESGPGSEPATSGSETPGTSESATPESGPGSPAGSPTSTEEGSPAGSPTSTEEGTSTEPSEGSAPGTSESATPESGPGTSESATPESGPGTSESATPESGPGSEPATSGSETPGSEPATSGSETPGSPAGSPTSTEEGTSTEPSEGSAPGTSTEPSEGSAPGSEPATSGSETPGTSESATPESGPGTESASK

SEQ ID NO: 382 - protein, 144 aa, Artificial Sequence
  Description of Artificial Sequence: Synthetic polypeptide
GSPGAGPSEPATSGSETPGTSESATPESGPGSEPATSGSETPGTSESATPESGPGTSTEPSEGSAPTAEAAGCGTAEAAGSPAGSPTSTEEGTSESATPESGPGSEPATSGSETPGTSESATPESGPGSPAGSPTSTEEGSASK

SEQ ID NO: 383 - protein, 144 aa, Artificial Sequence
  Description of Artificial Sequence: Synthetic polypeptide
GSPGAGEGTSTEPSEGSAPGTSESTAEAAGCGTAEAATPESGPGTSESATPESGPGSEPATSGSETPGSEPATSGTAEAAGCGTAEAATEEGTSTEPSEGSAPGTSTEPSEGSAPGSEPATSGSETPTAEAAGCGTAEAASASG

SEQ ID NO: 384 - protein, 432 aa, Artificial Sequence
  Description of Artificial Sequence: Synthetic polypeptide
GSPGAGSEPATSGSETPGTSESATPESGPGSEPATSGSETPGTSESATPESGPGTSTEPSEGSAPGTSESATPESGPGSPAGSPTSTEEGSPAGSPTSTEEGSPAGSPTSTEEGTSESATPESGPGTSTEPSEGSAPGTSESATPESGPGSEPATSGSETPGTSESATPESGPGSEPATSGSETPGTSESATPESGPGTSTEPSEGSAPTAEAAGCGTAEAAGSPAGSPTSTEEGTSESATPESGPGSEPATSGSETPGTSESATPESGPGSPAGSPTSTEEGSPAGSPTSTEEGTSTEPSEGSAPGTSESATPESGPGTSESATPESGPGTSESATPESGPGSEPATSGSETPGSEPATSGSETPGSPAGSPTSTEEGTSTEPSEGSAPGTSTEPSEGSAPGSEPATSGSETPGTSESATPESGPGTSASR

SEQ ID NO: 385 - protein, 432 aa, Artificial Sequence
  Description of Artificial Sequence: Synthetic polypeptide
GSPGAGSEPATSGSETPGTSESATPESGPGSEPATSGSETPGTSESATPESGPGTSTEPSEGSAPGTSESATPESGPGSPAGSPTSTEEGSPAGSPTSTEEGSPAGSPTSTEEGTSESATPESGPGTSTEPSEGSAPGTSESATPESGPGSEPATSGSETPGTSESATPESGPGSEPATSGSETPGTSESATPESGPGTSTEPSEGSAPTAEAAGCGTAEAAGSPAGSPTSTEEGTSESATPESGPGSEPATSGSETPGTSESATPESGPGSPAGSPTSTEEGSPAGSPTSTEEGTSTEPSEGSAPGTSESATPESGTAEAAGCGTAEAAGTSESATPESGPGSEPATSGSETPGSEPATSGSETPGSPAGSPTSTEEGTSTEPSEGSAPGTSTEPSEGSAPGSEPATSGSETPGTSESATPESGPGTSASR

SEQ ID NO: 386 - protein, 432 aa, Artificial Sequence
  Description of Artificial Sequence: Synthetic polypeptide
GSPGAGSEPATSGSETPGTSESATPESGPGSEPATSGSETPGTSESATPESGPGTSTEPSEGSAPGTSESATPESGPGSPAGSPTSTEEGSPAGSPTSTEETAEAAGCGTAEAATSESATPESGPGTSTEPSEGSAPGTSESATPESGPGSEPATSGSETPGTSESATPESGPGSEPATSGSETPGTSESATPESGPGTSTEPSEGSAPTAEAAGCGTAEAAGSPAGSPTSTEEGTSESATPESGPGSEPATSGSETPGTSESATPESGPGSPAGSPTSTEEGSPAGSPTSTEEGTSTEPSEGSAPGTSESATPESGTAEAAGCGTAEAAGTSESATPESGPGSEPATSGSETPGSEPATSGSETPGSPAGSPTSTEEGTSTEPSEGSAPGTSTEPSEGSAPGSEPATSGSETPGTSESATPESGPGTSASR

SEQ ID NO: 387 - protein, 144 aa, Artificial Sequence
  Description of Artificial Sequence: Synthetic polypeptide
GSPGAGSPAGSPTSTEEGTSESATPESGPGTSTEPCSGSAPGSPAGSPTSTEEGTSTEPSEGSAPGTSTEPCSGSAPGTSESATPESGPGSEPATSGSETPGSEPATCGSETPGSPAGSPTSTEEGTSESATPESGPGTESASR

SEQ ID NO: 388 - protein, 144 aa, Artificial Sequence
  Description of Artificial Sequence: Synthetic polypeptide
GSPGAGSPAGSPTSTEEGTSESATPESGPGTSTEGCGESAPGSPAGSPTSTEEGTSTEPSEGSAPGTSTEGCGESAPGTSESATPESGPGSEPATSGSETPGSEPAGCGSETPGSPAGSPTSTEEGTSESATPESGPGTESASR

SEQ ID NO: 389 - protein, 144 aa, Artificial Sequence
  Description of Artificial Sequence: Synthetic polypeptide
GSPGAGSPAGSPTSTEEGTSESATPESGPGTSTEPSEGSAPGSPAGSPTSGCGETSTEPSEGSAPGTSTEGCGESAPGTSESATPESGPSGCGATSGSETPGSEPATSGSETPGSPAGSPTSTEEGTSESATPESGPGTESASR

SEQ ID NO: 390 - protein, 144 aa, Artificial Sequence
  Description of Artificial Sequence: Synthetic polypeptide
GSPGAGSPAGSPTSTEEGTSESATPESGPGTSTEPSEGSAPGSPAGSPTSTEEGTSTEPSGCGAPGTSTEGCGESAPGTSGCGTPESGPGSEPATSGSETPGSEPATSGSETPGSPAGSPTSTEEGTSESATPESGPGTESASR

SEQ ID NO: 391 - protein, 72 aa, Artificial Sequence
  Description of Artificial Sequence: Synthetic polypeptide
GSPGAGSPAGSPTSTEEGTSESATPESGPGCGTEPSEGSAPGSPGCGPTSTEEGTSTEPGCGSAPGTESASR

SEQ ID NO: 392 - protein, 759 aa, Artificial Sequence
  Description of Artificial Sequence: Synthetic polypeptide
GSPGAGSCAGSPTSTEEGTSESACSPEGPGTSTEPSEGSCGGPGSPAGSPTSTEEGTSESATPESGPGTSTEPSEGSAPGSPAGSPTSTEEGTSTEPSEGSAPGTSTEPSEGSAPGTSESATPESGPGSEPATSGSETPGSEPATSGSETPGSPAGSPTSTEEGTSESATPESGPGTSTEPSEGSAPGTSTEPSEGSAPGSPAGSPTSTEEGTSTEPSEGSAPGTSTEPSEGSAPGTSESATPESGPGTSTEPSEGSAPGTSESATPESGPGSEPATSGSETPGTSTEPSEGSAPGTSTEPSEGSAPGTSESATPESGPGTSESATPESGPGSPAGSPTSTEEGTSESATPESGPGSEPATSGSETPGTSESATPESGPGTSTEPSEGSAPGTSTEPSEGSAPGTSTEPSEGSAPGTSTEPSEGSAPGTSTEPSEGSAPGTSTEPSEGSAPGSPAGSPTSTEEGTSTEPSEGSAPGTSESATPESGPGSEPATSGSETPGTSESATPESGPGSEPATSGSETPGTSESATPESGPGTSTEPSEGSAPGTSESATPESGPGSPAGSPTSTEEGSPAGSPTSTEEGSPAGSPTSTEEGTSESATPESGPGTSTEPSEGSAPGTSESATPESGPGSEPATSGSETPGTSESATPESGPGSEPATSGSETPGTSESATPESGPGTSTEPSEGSAPGSPAGSPTSTEEGTSESATPESGPGSEPATSGSETPGTSESATPESGPGSPAGSPTSTEEGSPASASR

SEQ ID NO: 393 - protein, 771 aa, Artificial Sequence
  Description of Artificial Sequence: Synthetic polypeptide
GSPGAGSCAGSPTSTEEGTSESACSPEGPGTSTEPSEGSCGGLSGRSDNHSPLGLAGSPGSPAGSPTSTEEGTSESATPESGPGTSTEPSEGSAPGSPAGSPTSTEEGTSTEPSEGSAPGTSTEPSEGSAPGTSESATPESGPGSEPATSGSETPGSEPATSGSETPGSPAGSPTSTEEGTSESATPESGPGTSTEPSEGSAPGTSTEPSEGSAPGSPAGSPTSTEEGTSTEPSEGSAPGTSTEPSEGSAPGTSESATPESGPGTSTEPSEGSAPGTSESATPESGPGSEPATSGSETPGTSTEPSEGSAPGTSTEPSEGSAPGTSESATPESGPGTSESATPESGPGSPAGSPTSTEEGTSESATPESGPGSEPATSGSETPGTSESATPESGPGTSTEPSEGSAPGTSTEPSEGSAPGTSTEPSEGSAPGTSTEPSEGSAPGTSTEPSEGSAPGTSTEPSEGSAPGSPAGSPTSTEEGTSTEPSEGSAPGTSESATPESGPGSEPATSGSETPGTSESATPESGPGSEPATSGSETPGTSESATPESGPGTSTEPSEGSAPGTSESATPESGPGSPAGSPTSTEEGSPAGSPTSTEEGSPAGSPTSTEEGTSESATPESGPGTSTEPSEGSAPGTSESATPESGPGSEPATSGSETPGTSESATPESGPGSEPATSGSETPGTSESATPESGPGTSTEPSEGSAPGSPAGSPTSTEEGTSESATPESGPGSEPATSGSETPGTSESATPESGPGSPAGSPTSTEEGSPA

SEQ ID NO: 394 - protein, 771 aa, Artificial Sequence
  Description of Artificial Sequence: Synthetic polypeptide
GSPGAGSCAGSPTSTEEGTSESACSPEGPGTSTEPSEGSCGGLAGRSDNHSPLGLAGSPGSPAGSPTSTEEGTSESATPESGPGTSTEPSEGSAPGSPAGSPTSTEEGTSTEPSEGSAPGTSTEPSEGSAPGTSESATPESGPGSEPATSGSETPGSEPATSGSETPGSPAGSPTSTEEGTSESATPESGPGTSTEPSEGSAPGTSTEPSEGSAPGSPAGSPTSTEEGTSTEPSEGSAPGTSTEPSEGSAPGTSESATPESGPGTSTEPSEGSAPGTSESATPESGPGSEPATSGSETPGTSTEPSEGSAPGTSTEPSEGSAPGTSESATPESGPGTSESATPESGPGSPAGSPTSTEEGTSESATPESGPGSEPATSGSETPGTSESATPESGPGTSTEPSEGSAPGTSTEPSEGSAPGTSTEPSEGSAPGTSTEPSEGSAPGTSTEPSEGSAPGTSTEPSEGSAPGSPAGSPTSTEEGTSTEPSEGSAPGTSESATPESGPGSEPATSGSETPGTSESATPESGPGSEPATSGSETPGTSESATPESGPGTSTEPSEGSAPGTSESATPESGPGSPAGSPTSTEEGSPAGSPTSTEEGSPAGSPTSTEEGTSESATPESGPGTSTEPSEGSAPGTSESATPESGPGSEPATSGSETPGTSESATPESGPGSEPATSGSETPGTSESATPESGPGTSTEPSEGSAPGSPAGSPTSTEEGTSESATPESGPGSEPATSGSETPGTSESATPESGPGSPAGSPTSTEEGSPA

SEQ ID NO: 395 - protein, 771 aa, Artificial Sequence
  Description of Artificial Sequence: Synthetic polypeptide
GSPGAGSCAGSPTSTEEGTSESACSPEGPGTSTEPSEGSCGGSPLGLAGSLSGRSDNHPGSPAGSPTSTEEGTSESATPESGPGTSTEPSEGSAPGSPAGSPTSTEEGTSTEPSEGSAPGTSTEPSEGSAPGTSESATPESGPGSEPATSGSETPGSEPATSGSETPGSPAGSPTSTEEGTSESATPESGPGTSTEPSEGSAPGTSTEPSEGSAPGSPAGSPTSTEEGTSTEPSEGSAPGTSTEPSEGSAPGTSESATPESGPGTSTEPSEGSAPGTSESATPESGPGSEPATSGSETPGTSTEPSEGSAPGTSTEPSEGSAPGTSESATPESGPGTSESATPESGPGSPAGSPTSTEEGTSESATPESGPGSEPATSGSETPGTSESATPESGPGTSTEPSEGSAPGTSTEPSEGSAPGTSTEPSEGSAPGTSTEPSEGSAPGTSTEPSEGSAPGTSTEPSEGSAPGSPAGSPTSTEEGTSTEPSEGSAPGTSESATPESGPGSEPATSGSETPGTSESATPESGPGSEPATSGSETPGTSESATPESGPGTSTEPSEGSAPGTSESATPESGPGSPAGSPTSTEEGSPAGSPTSTEEGSPAGSPTSTEEGTSESATPESGPGTSTEPSEGSAPGTSESATPESGPGSEPATSGSETPGTSESATPESGPGSEPATSGSETPGTSESATPESGPGTSTEPSEGSAPGSPAGSPTSTEEGTSESATPESGPGSEPATSGSETPGTSESATPESGPGSPAGSPTSTEEGSPA

SEQ ID NO: 396 - protein, 743 aa, Artificial Sequence
  Description of Artificial Sequence: Synthetic polypeptide
GAPCGAGCAGPCGPLAGRSDNHSPLGLAGSPGSPAGSPTSTEEGTSESATPESGPGTSTEPSEGSAPGSPAGSPTSTEEGTSTEPSEGSAPGTSTEPSEGSAPGTSESATPESGPGSEPATSGSETPGSEPATSGSETPGSPAGSPTSTEEGTSESATPESGPGTSTEPSEGSAPGTSTEPSEGSAPGSPAGSPTSTEEGTSTEPSEGSAPGTSTEPSEGSAPGTSESATPESGPGTSTEPSEGSAPGTSESATPESGPGSEPATSGSETPGTSTEPSEGSAPGTSTEPSEGSAPGTSESATPESGPGTSESATPESGPGSPAGSPTSTEEGTSESATPESGPGSEPATSGSETPGTSESATPESGPGTSTEPSEGSAPGTSTEPSEGSAPGTSTEPSEGSAPGTSTEPSEGSAPGTSTEPSEGSAPGTSTEPSEGSAPGSPAGSPTSTEEGTSTEPSEGSAPGTSESATPESGPGSEPATSGSETPGTSESATPESGPGSEPATSGSETPGTSESATPESGPGTSTEPSEGSAPGTSESATPESGPGSPAGSPTSTEEGSPAGSPTSTEEGSPAGSPTSTEEGTSESATPESGPGTSTEPSEGSAPGTSESATPESGPGSEPATSGSETPGTSESATPESGPGSEPATSGSETPGTSESATPESGPGTSTEPSEGSAPGSPAGSPTSTEEGTSESATPESGPGSEPATSGSETPGTSESATPESGPGSPAGSPTSTEEGSPA

SEQ ID NO: 397 - protein, 176 aa, Artificial Sequence
  Description of Artificial Sequence: Synthetic polypeptide
GAPCGAGCAGPCGPLAGRSDNHSPLGLAGSPGSPAGSPTSTEEGTSESATPESGPGTSTEPSEGSAPGSPAGSPTSTEEGTSTEPSEGSAPGTSTEPSEGSAPGTSESATPESGPGSEPATSGSETPGSEPATSGSETPGSPAGSPTSTEEGTSESATPESGPGTSTEPSEGSAPG

SEQ ID NO: 398 - protein, 864 aa, Artificial Sequence
  Description of Artificial Sequence: Synthetic polypeptide
GSPGAGSCAGSPTSTEEGTSESACSPEGPGTSTEPSEGSCGGPGSPAGSPTSTEEGTSESATPESGPGTSTEPSEGSAPGSPAGSPTSTEEGTSTEPSEGSAPGTSTEPSEGSAPGTSESATPESGPGSEPATSGSETPGSEPATSGSETPGSPAGSPTSTEEGTSESATPESGPGTSTEPSEGSAPGTSTEPSEGSAPGSPAGSPTSTEEGTSTEPSEGSAPGTSTEPSEGSAPGTSESATPESGPGTSTEPSEGSAPGTSESATPESGPGSEPATSGSETPGTSTEPSEGSAPGTSTEPSEGSAPGTSESATPESGPGTSESATPESGPGSPAGSPTSTEEGTSESATPESGPGSEPATSGSETPGTSESATPESGPGTSTEPSEGSAPGTSTEPSEGSAPGTSTEPSEGSAPGTSTEPSEGSAPGTSTEPSEGSAPGTSTEPSEGSAPGSPAGSPTSTEEGTSTEPSEGSAPGTSESATPESGPGSEPATSGSETPGTSESATPESGPGSEPATSGSETPGTSESATPESGPGTSTEPSEGSAPGTSESATPESGPGSPAGSPTSTEEGSPAGSPTSTEEGSPAGSPTSTEEGTSESATPESGPGTSTEPSEGSAPGTSESATPESGPGSEPATSGSETPGTSESATPESGPGSEPATSGSETPGTSESATPESGPGTSTEPSEGSAPGSPAGSPTSTEEGTSESATPESGPGSEPATSGSETPGTSESATPESGPGSPAGSPTSTEEGSPAGSPTSTEEGTSTEPSEGSAPGTSESATPESGPGTSESATPESGPGTSESATPESGPGSEPATSGSETPGSEPATSGSETPGSPAGSPTSTEEGTSTEPSEGSAPGSASR

SEQ ID NO: 399 - protein, 288 aa, Artificial Sequence
  Description of Artificial Sequence: Synthetic polypeptide
GSPGATGCGSEPATSGSETPGTSESATPESGPGSEPATSGSETPGTSESATPESGPGTSTEPSEGSAPGSPAGSPTSTEEGTSESATPESGPGSEPATSGSETPGTSESATPESGPGSPAGSPTSTEEGSPAGSPTSTEEGTSTEPSEGSAPGTSESATPESGPGTSESATPESGPGTSESATPESGPGSEPATSGSETPGSEPATSGSETPGSPAGSPTSTEEGTSTEPSEGSAPGTSTEPSEGSAPGSEPATSGSETPGTSESATPESGPGTSTEPSEGSAPSASR

SEQ ID NO: 400 - protein, 771 aa, Artificial Sequence
  Description of Artificial Sequence: Synthetic polypeptide
GSPGAGSCAGSPTSTEEGTSESACSPEGPGTSTEPSEGSCGGLAGRSDNHVPLSLSMGPGSPAGSPTSTEEGTSESATPESGPGTSTEPSEGSAPGSPAGSPTSTEEGTSTEPSEGSAPGTSTEPSEGSAPGTSESATPESGPGSEPATSGSETPGSEPATSGSETPGSPAGSPTSTEEGTSESATPESGPGTSTEPSEGSAPGTSTEPSEGSAPGSPAGSPTSTEEGTSTEPSEGSAPGTSTEPSEGSAPGTSESATPESGPGTSTEPSEGSAPGTSESATPESGPGSEPATSGSETPGTSTEPSEGSAPGTSTEPSEGSAPGTSESATPESGPGTSESATPESGPGSPAGSPTSTEEGTSESATPESGPGSEPATSGSETPGTSESATPESGPGTSTEPSEGSAPGTSTEPSEGSAPGTSTEPSEGSAPGTSTEPSEGSAPGTSTEPSEGSAPGTSTEPSEGSAPGSPAGSPTSTEEGTSTEPSEGSAPGTSESATPESGPGSEPATSGSETPGTSESATPESGPGSEPATSGSETPGTSESATPESGPGTSTEPSEGSAPGTSESATPESGPGSPAGSPTSTEEGSPAGSPTSTEEGSPAGSPTSTEEGTSESATPESGPGTSTEPSEGSAPGTSESATPESGPGSEPATSGSETPGTSESATPESGPGSEPATSGSETPGTSESATPESGPGTSTEPSEGSAPGSPAGSPTSTEEGTSESATPESGPGSEPATSGSETPGTSESATPESGPGSPAGSPTSTEEGSPA

SEQ ID NO: 401 - protein, 312 aa, Artificial Sequence
  Description of Artificial Sequence: Synthetic polypeptide
GSPGTSESATPESGPGSEPATSGSETPGTSESATPESGPGSEPATSGSETPGTSESATPESGPGTSTEPSEGSAPGSPAGSPTSTEEGTSESATPESGPGSEPATSGSETPGTSESATPESGPGSPAGSPTSTEEGSPAGSPTSTEEGTSTEPSEGSAPGTSESATPESGPGTSESATPESGPGTSESATPESGPGSEPATSGSETPGSEPATSGSETPGSPAGSPTSTEEGTSTEPSEGSAPGTSTEPSEGSAPGSEPATSGSETPGTSESATPESGPGTSTEPSEGSAPGGAPCGPAGGSSSHHHHHHHH

SEQ ID NO: 402 - protein, 304 aa, Artificial Sequence
  Description of Artificial Sequence: Synthetic polypeptide
GSPGTSESATPESGPGSEPATSGSETPGTSESATPESGPGSEPATSGSETPGTSESATPESGPGTSTEPSEGSAPGSPAGSPTSTEEGTSESATPESGPGSEPATSGSETPGTSESATPESGPGSPAGSPTSTEEGSPAGSPTSTEEGTSTEPSEGSAPGTSESATPESGPGTSESATPESGPGTSESATPESGPGSEPATSGSETPGSEPATSGSETPGSPAGSPTSTEEGTSTEPSEGSAPGTSTEPSEGSAPGSEPATSGSETPGTSESATPESGPGTSTEPSEGSAPGGAPCGPAGGSSS

SEQ ID NO: 403 - protein, 52 aa, Artificial Sequence
  Description of Artificial Sequence: Synthetic polypeptide
GSPGSAGSGSETPGTSESATPESGPGTSTEPSGAPCGPAGGSSSHHHHHHHH

SEQ ID NO: 404 - protein, 44 aa, Artificial Sequence
  Description of Artificial Sequence: Synthetic polypeptide
GSPGSAGSGSETPGTSESATPESGPGTSTEPSGAPCGPAGGSSS

SEQ ID NO: 405 - protein, 44 aa, Artificial Sequence
  Description of Artificial Sequence: Synthetic polypeptide
PSEGSAPGSEPATSGSETPGSTAEAAGCGTAEAASAHHHHHHHH

SEQ ID NO: 406 - protein, 36 aa, Artificial Sequence
  Description of Artificial Sequence: Synthetic polypeptide
PSEGSAPGSEPATSGSETPGSTAEAAGCGTAEAASA

SEQ ID NO: 407 - protein, 32 aa, Artificial Sequence
  Description of Artificial Sequence: Synthetic polypeptide
TSGSETPGSTAEAAGCGTAEAASAHHHHHHHH

SEQ ID NO: 408 - protein, 24 aa, Artificial Sequence
  Description of Artificial Sequence: Synthetic peptide
TSGSETPGSTAEAAGCGTAEAASA

SEQ ID NO: 409 - protein, 20 aa, Artificial Sequence
  Description of Artificial Sequence: Synthetic peptide
GSTAEAAGCGTAHHHHHHHH

SEQ ID NO: 410 - protein, 12 aa, Artificial Sequence
  Description of Artificial Sequence: Synthetic peptide
GSTAEAAGCGTA

SEQ ID NO: 411 - protein, 11 aa, Artificial Sequence
  Description of Artificial Sequence: Synthetic peptide
GCGHHHHHHHH

SEQ ID NO: 412 - protein, 13 aa, Artificial Sequence
  Description of Artificial Sequence: Synthetic peptide
KNPEQAEEQREET

SEQ ID NO: 413 - protein, 13 aa, Artificial Sequence
  Description of Artificial Sequence: Synthetic peptide
KNPEQAEEQSEET

SEQ ID NO: 414 - protein, 17 aa, Artificial Sequence
  Description of Artificial Sequence: Synthetic peptide
KNPEQAEEQAEEQREET

SEQ ID NO: 415 - protein, 17 aa, Artificial Sequence
  Description of Artificial Sequence: Synthetic peptide
KNPEQAEEQAEEQSEET

SEQ ID NO: 416 - protein, 17 aa, Artificial Sequence
  Description of Artificial Sequence: Synthetic peptide
KNHEQAEEQAEEQSEET

SEQ ID NO: 417 - protein, 17 aa, Artificial Sequence
  Description of Artificial Sequence: Synthetic peptide
KKHEQAEEQAEEQSEET

SEQ ID NO: 418 - protein, 17 aa, Artificial Sequence
  Description of Artificial Sequence: Synthetic peptide
KKPEQAEEQAEEQREET

SEQ ID NO: 419 - protein, 17 aa, Artificial Sequence
  Description of Artificial Sequence: Synthetic peptide
KNHEQEKEKAEEQSEET

SEQ ID NO: 420 - protein, 17 aa, Artificial Sequence
  Description of Artificial Sequence: Synthetic peptide
KKQEQEEKKAEEQREET

SEQ ID NO: 421 - protein, 17 aa, Artificial Sequence
  Description of Artificial Sequence: Synthetic peptide
KNHEKDEKKAEEQSEET

SEQ ID NO: 422 - protein, 17 aa, Artificial Sequence
  Description of Artificial Sequence: Synthetic peptide
KKQEQEKEQAEEQREET

SEQ ID NO: 423 - protein, 17 aa, Artificial Sequence
  Description of Artificial Sequence: Synthetic peptide
KNPEQEKEKAEEQREET

SEQ ID NO: 424 - protein, 17 aa, Artificial Sequence
  Description of Artificial Sequence: Synthetic peptide
KKPEQEEKQAEEQREET

SEQ ID NO: 425 - protein, 21 aa, Artificial Sequence
  Description of Artificial Sequence: Synthetic peptide
KKQEQEKEQAEEQAESEREET

SEQ ID NO: 426 - protein, 21 aa, Artificial Sequence
  Description of Artificial Sequence: Synthetic peptide
KKQEQEKEQAEEQSQSQREET

SEQ ID NO: 427 - protein, 21 aa, Artificial Sequence
  Description of Artificial Sequence: Synthetic peptide
KKQEQEKEQAEEQSESEREET

SEQ ID NO: 428 - protein, 25 aa, Artificial Sequence
  Description of Artificial Sequence: Synthetic peptide
KKQEQEKEQAEEQAKAESEAEREET

SEQ ID NO: 429 - protein, 25 aa, Artificial Sequence
  Description of Artificial Sequence: Synthetic peptide
KKQEQEKEQAEEQSKSQAEAEREET

SEQ ID NO: 430 - protein, 25 aa, Artificial Sequence
  Description of Artificial Sequence: Synthetic peptide
KKQEQEKEQAEEQAQAQAEDEREET

SEQ ID NO: 431 - protein, 25 aa, Artificial Sequence
  Description of Artificial Sequence: Synthetic peptide
KKQEQEKEQAEEQSKSKAEDEREET

SEQ ID NO: 432 - protein, 123 aa, Artificial Sequence [sequence omitted]

SEQ ID NO: 433 - protein, 122 aa, Artificial Sequence
  Description of Artificial Sequence: Synthetic polypeptide
EVQLVESGGGLVQPGGSLRLSCAASGFTFSSYDIHWVRQATGKGLEWVSAIGPAGDTYYPGSVKGRFTISRENAKNSLYLQMNSLRAGDTAVYYCARGLITFGGLIAPFDYWGQGTLVTVSS

SEQ ID NO: 434 - protein, 120 aa, Artificial Sequence
  Description of Artificial Sequence: Synthetic polypeptide
QVKLEQSGAEVVKPGASVKLSCKASGFNIKDSYMHWLRQGPGQRLEWIGWIDPENGDTEYAPKFQGKATFTTDTSANTAYLGLSSLRPEDTAVYYCNEGTPTGPYYFDYWGQGTLVTVSS

SEQ ID NO: 435 - protein, 121 aa, Artificial Sequence
  Description of Artificial Sequence: Synthetic polypeptide
EVQLVESGGGLVQPGGSLRLSCAASGFNIKDTYMHWVRQAPGKGLEWVARIDPANGNSKYADSVKGRFTISADTSKNTAYLQMNSLRAEDTAVYYCAPFGYYVSDYAMAYWGQGTLVTVSS

SEQ ID NO: 436 - protein, 121 aa, Artificial Sequence
  Description of Artificial Sequence: Synthetic polypeptide
EVQLVESGGGLVQPGGSLRLSCAASGFNIKDTYMHWVRQAPGKGLEWVARIDPANGNSKYVPKFQGRATISADTSKNTAYLQMNSLRAEDTAVYYCAPFGYYVSDYAMAYWGQGTLVTVSS

SEQ ID NO: 437 - protein, 119 aa, Artificial Sequence
  Description of Artificial Sequence: Synthetic polypeptide
EVQLVESGGGVVQPGRSLRLSCSASGFDFTTYWMSWVRQAPGKGLEWIGEIHPDSSTINYAPSLKDRFTISRDNAKNTLFLQMDSLRPEDTGVYFCASLYFGFPWFAYWGQGTPVTVSS

SEQ ID NO: 438 - protein, 121 aa, Artificial Sequence
  Description of Artificial Sequence: Synthetic polypeptide
EVKLVESGGGLVQPGGSLRLSCATSGFTFTDYYMNWVRQPPGKALEWLGFIGNKANGYTTEYSASVKGRFTISRDKSQSILYLQMNTLRAEDSATYYCTRDRGLRFYFDYWGQGTTLTVSS

SEQ ID NO: 439 - protein, 121 aa, Artificial Sequence
  Description of Artificial Sequence: Synthetic polypeptide
EVQLVESGGGLVQPGRSLRLSCAASGFTVSSYWMHWVRQAPGKGLEWVGFIRNKANGGTTEYAASVKGRFTISRDDSKNTLYLQMNSLRAEDTAVYYCARDRGLRFYFDYWGQGTTVTVSS

SEQ ID NO: 440 - protein, 124 aa, Artificial Sequence
  Description of Artificial Sequence: Synthetic polypeptide
QVQLQQSGAELVRPGSSVKISCKASGYAFSSYWMNWVKQRPGQGLEWIGQIWPGDGDTNYNGKFKGKATLTADESSSTAYMQLSSLASEDSAVYFCARRETTTVGRYYYAMDYWGQGTTVTVSS

SEQ ID NO: 441 - protein, 123 aa, Artificial Sequence
  Description of Artificial Sequence: Synthetic polypeptide
EVQLVESGGGLVQPGRSLRLSCAASGFTFNDYAMHWVRQAPGKGLEWVSTISWNSGSIGYADSVKGRFTISRDNAKKSLYLQMNSLRAEDTALYYCAKDIQYGNYYYGMDVWGQGTTVTVSSA

SEQ ID NO: 442 - protein, 122 aa, Artificial Sequence
  Description of Artificial Sequence: Synthetic polypeptide
QAYLQQSGAELVRPGASVKMSCKASGYTFTSYNMHWVKQTPRQGLEWIGAIYPGNGDTSYNQKFKGKATLTVDKSSSTAYMQLSSLTSEDSAVYFCARVVYYSNSYWYFDVWGTGTTVTVSG

SEQ ID NO: 443 - protein, 119 aa, Artificial Sequence
  Description of Artificial Sequence: Synthetic polypeptide
QVQLVQSGAEVKKPGSSVKVSCKASGYAFSYSWINWVRQAPGQGLEWMGRIFPGDGDTDYNGKFKGRVTITADKSTSTAYMELSSLRSEDTAVYYCARNVFDGYWLVYWGQGTLVTVSS

SEQ ID NO: 444 - protein, 122 aa, Artificial Sequence [sequence omitted]

SEQ ID NO: 445 - protein, 122 aa, Artificial Sequence
  Description of Artificial Sequence: Synthetic polypeptide
QVQLQQPGAELVKPGASVKMSCKASGYTFTSYNMHWVKQTPGRGLEWIGAIYPGNGDTSYNQKFKGKATLTADKSSSTAYMQLSSLTSEDSAVYYCARSTYYGGDWYFNVWGAGTTVTVSAA

SEQ ID NO: 446 - protein, 122 aa, Artificial Sequence [sequence omitted]

SEQ ID NO: 447 - protein, 120 aa, Artificial Sequence
  Description of Artificial Sequence: Synthetic polypeptide
QLVQSGAEVKKPGSSVKVSCKASGYTITDSNIHWVRQAPGQSLEWIGYIYPYNGGTDYNQKFKNRATLTVDNPTNTAYMELSSLRSEDTDFYYCVNGNPWLAYWGQGTLVTVSSASTKGP

SEQ ID NO: 448 - protein, 122 aa, Artificial Sequence [sequence omitted]

SEQ ID NO: 449 - protein, 117 aa, Artificial Sequence
  Description of Artificial Sequence: Synthetic polypeptide
QVQLVQSGAEVKKPGASVKVSCKASGYTFTSYGFSWVRQAPGQGLEWMGWISASNGNTYYAQKLQGRVTMTTDTSTSTAYMELRSLRSDDTAVYYCARVYADYADYWGQGTLVTVSS

SEQ ID NO: 450 - protein, 115 aa, Artificial Sequence [sequence omitted]

SEQ ID NO: 451 - protein, 120 aa, Artificial Sequence
  Description of Artificial Sequence: Synthetic polypeptide
EVQLVESGGGLVQPGGSLRLSCAASGYTFTSYWLHWVRQAPGKGLEWVGMIDPSNSDTRFNPNFKDRFTISADTSKNTAYLQMNSLRAEDTAVYYCATYRSYVTPLDYWGQGTLVTVSSA

SEQ ID NO: 452 - protein, 125 aa, Artificial Sequence
  Description of Artificial Sequence: Synthetic polypeptide
QVQLVESGGGVVQPGRSLRLSCAASGFTFSSYGMHWVRQAPGKGLEWVAVIWYDGSNKYYADSVKGRFTISRDNSKNTLYLQMNSLRAEDTAVYYCARDPRGATLYYYYYGMDVWGQGTTVTVSS

SEQ ID NO: 453 - protein, 118 aa, Artificial Sequence
  Description of Artificial Sequence: Synthetic polypeptide
QVQLVESGGGVVQPGRSLRLSCAASGFTFSSYTMHWVRQAPGKGLEWVTFISYDGNNKYYADSVKGRFTISRDNSKNTLYLQMNSLRAEDTAIYYCARTGWLGPFDYWGQGTLVTVSS

SEQ ID NO: 454 - protein, 120 aa, Artificial Sequence
  Description of Artificial Sequence: Synthetic polypeptide
EVQLLEQSGAELVRPGTSVKISCKASGYAFTNYWLGWVKQRPGHGLEWIGDIFPGSGNIHYNEKFKGKATLTADKSSSTAYMQLSSLTFEDSAVYFCARLRNWDEPMDYWGQGTTVTVSS

SEQ ID NO: 455 - protein, 127 aa, Artificial Sequence
  Description of Artificial Sequence: Synthetic polypeptide
EVQLLESGGGVVQPGRSLRLSCAASGFTFSSYGMHWVRQAPGKGLEWVAVISYDGSNKYYADSVKGRFTISRDNSKNTLYLQMNSLRAEDTAVYYCAKDMGWGSGWRPYYYYGMDVWGQGTTVTVSS

SEQ ID NO: 456 - protein, 116 aa, Artificial Sequence
  Description of Artificial Sequence: Synthetic polypeptide
QVQLQQSGAELVRPGTSVKVSCKASGYAFTNYLIEWVKQRPGQGLEWIGVINPGSGGTNYNEKFKGKATLTADKSSSTAYMQLSSLTSDDSAVYFCARDGPWFAYWGQGTLVTVSA

SEQ ID NO: 457 - protein, 116 aa, Artificial Sequence
  Description of Artificial Sequence: Synthetic polypeptide
QIQLVQSGPELKKPGETVKISCKASGYTFTNYGMNWVRQAPGKGLKWMGWINTYTGEPTYADDFKGRFVFSLETSASTAFLQLNNLRSEDTATYFCVRFISKGDYWGQGTSVTVSS

SEQ ID NO: 458 - protein, 113 aa, Artificial Sequence
  Description of Artificial Sequence: Synthetic polypeptide
VQLQQSDAELVKPGASVKISCKASGYTFTDHAIHWVKQNPEQGLEWIGYFSPGNDDFKYNERFKGKATLTADKSSSTAYVQLNSLTSEDSAVYFCTRSLNMAYWGQGTSVTVS

SEQ ID NO: 459 - protein, 116 aa, Artificial Sequence
  Description of Artificial Sequence: Synthetic polypeptide
EVQLVQSGPEVKKPGASVKVSCKASGYTFTNYGMNWVRQAPGQGLEWMGWINTYTGEPTYGEDFKGRFAFSLDTSASTAYMELSSLRSEDTAVYFCARFGNYVDYWGQGSLVTVSS

SEQ ID NO: 460 - protein, 116 aa, Artificial Sequence
  Description of Artificial Sequence: Synthetic polypeptide
EVQLVQSGPGLVQPGGSVRISCAASGYTFTNYGMNWVKQAPGKGLEWMGWINTYTGESTYADSFKGRFTFSLDTSASAAYLQINSLRAEDTAVYYCARFAIKGDYWGQGTLLTVSS

SEQ ID NO: 461 - protein, 129 aa, Artificial Sequence
  Description of Artificial Sequence: Synthetic polypeptide
EVQLLESGGGLVQPGGSLRLSCAASGFTFSHYMMAWVRQAPGKGLEWVSRIGPSGGPTHYADSVKGRFTISRDNSKNTLYLQMNSLRAEDTAVYYCAGYDSGYDYVAVAGPAEYFQHWGQGTLVTVSSA

SEQ ID NO: 462 - protein, 119 aa, Artificial Sequence
  Description of Artificial Sequence: Synthetic polypeptide
EVQLVESGGGVVQPGRSLRLSCSASGFTFSGYGLSWVRQAPGKGLEWVAMISSGGSYTYYADSVKGRFAISRDNAKNTLFLQMDSLRPEDTGVYFCARHGDDPAWFAYWGQGTPVTVSS

SEQ ID NO: 463 - protein, 118 aa, Artificial Sequence
  Description of Artificial Sequence: Synthetic polypeptide
QVQLVQSGAEVVKPGASVKISCKASGYTFTGYFMNWVKQSPGQSLEWIGRIHPYDGDTFYNQKFQGKATLTVDKSSNTAHMELLSLTSEDFAVYYCTRYDGSRAMDYWGQGTTVTVSS

SEQ ID NO: 464 - protein, 118 aa, Artificial Sequence; identical to SEQ ID NO: 463
  Description of Artificial Sequence: Synthetic polypeptide

SEQ ID NO: 465 - protein, 109 aa, Artificial Sequence
  Description of Artificial Sequence: Synthetic polypeptide
GPELVKPGASVKISCKASDYSFTGYFMNWVMQSHGKSLEWIGRIFPYNGDTFYNQKFKGRATLTVDKSSSTAHMELRSLASEDSAVYFCARGTHYFDYWGQGTTLTVSS

SEQ ID NO: 466 - protein, 124 aa, Artificial Sequence
  Description of Artificial Sequence: Synthetic polypeptide
QVQLVESGGGVVQSGRSLRLSCAASGFTFRNYGMHWVRQAPGKGLEWVAVIWYDGSDKYYADSVRGRFTISRDNSKNTLYLQMNSLRAEDTAVYYCARDGYDILTGNPRDFDYWGQGTLVTVSS

SEQ ID NO: 467 - protein, 120 aa, Artificial Sequence
  Description of Artificial Sequence: Synthetic polypeptide
QVQLKQSGPGLVQPSQSLSITCTVSGFSLTNYGVHWVRQSPGKGLEWLGVIWSGGNTDYNTPFTSRLSINKDNSKSQVFFKMNSLQSNDTAIYYCARALTYYDYEFAYWGQGTLVTVSAA

SEQ ID NO: 468 - protein, 120 aa, Artificial Sequence [sequence omitted]

SEQ ID NO: 469 - protein, 125 aa, Artificial Sequence [sequence omitted]

SEQ ID NO: 470 - protein, 121 aa, Artificial Sequence [sequence omitted]

SEQ ID NO: 471 - protein, 121 aa, Artificial Sequence
  Description of Artificial Sequence: Synthetic polypeptide
QVQLVQSGAEVKKPGSSVKVSCKASGGTFSSYAISWVRQAPGQGLEWMGSIIPIFGTVNYAQKFQGRVTITADESTSTAYMELSSLRSEDTAVYYCARDPSVNLYWYFDLWGRGTLVTVSS

SEQ ID NO: 472 - protein, 119 aa, Artificial Sequence
  Description of Artificial Sequence: Synthetic polypeptide
QVQLVQSGAEVKKPGSSVKVSCKASGGTFGSYAISWVRQAPGQGLEWMGSIIPIFGAANPAQKSQGRVTITADESTSTAYMELSSLRSEDTAVYYCAKMGRGKVAFDIWGQGTMVTVSS

SEQ ID NO: 473 - protein, 123 aa, Artificial Sequence
  Description of Artificial Sequence: Synthetic polypeptide
QVQLVQSGAEVKKPGASVKVSCKASGYAFTSYGINWVRQAPGQGLEWMGWISAYNGNTYYAQKLRGRVTMTTDTSTSTAYMELRSLRSDDTAVYYCARDLGGYGSGSVPFDPWGQGTLVTVSS

SEQ ID NO: 474 - protein, 123 aa, Artificial Sequence [sequence omitted]

SEQ ID NO: 475 - protein, 120 aa, Artificial Sequence
  Description of Artificial Sequence: Synthetic polypeptide
QVQLQESGPGLVKPSETLSLTCTVSGGSVSSGDYYWTWIRQSPGKGLEWIGHIYYSGNTNYNPSLKSRLTISIDTSKTQFSLKLSSVTAADTAIYYCVRDRVTGAFDIWGQGTMVTVSSA

SEQ ID NO: 476 - protein, 118 aa, Artificial Sequence
  Description of Artificial Sequence: Synthetic polypeptide
QIQLVQSGPELKKPGETVKISCKASGYTFTEYPIHWVKQAPGKGFKWMGMIYTDIGKPTYAEEFKGRFAFSLETSASTAYLQINNLKNEDTATYFCVRDRYDSLFDYWGQGTTLTVSS

SEQ ID NO: 477 - protein, 121 aa, Artificial Sequence
  Description of Artificial Sequence: Synthetic polypeptide
EMQLVESGGGFVKPGGSLKLSCAASGFAFSHYDMSWVRQTPKQRLEWVAYIASGGDITYYADTVKGRFTISRDNAQNTLYLQMSSLKSEDTAMFYCSRSSYGNNGDALDFWGQGTSVTVSS

SEQ ID NO: 478 - protein, 119 aa, Artificial Sequence
  Description of Artificial Sequence: Synthetic polypeptide
QVQLVESGGGLVQPGGSLRLSCAASGFTFSSYAMGWVRQAPGKGLEWVSSISGSSRYIYYADSVKGRFTISRDNSKNTLYLQMNSLRAEDTAVYYCAKMDASGSYFNFWGQGTLVTVSS

SEQ ID NO: 479 - protein, 115 aa, Artificial Sequence
  Description of Artificial Sequence: Synthetic polypeptide
QVQLLQSAAEVKKPGESLKISCKGSGYSFTSYWIGWVRQMPGKGLEWMGIIYPGDSDTRYSPSFQGQVTISADKSISTAYLQWSSLKASDTAVYYCARWRDSPLWGQGTLVTVSS

SEQ ID NO: 480 - protein, 121 aa, Artificial Sequence
  Description of Artificial Sequence: Synthetic polypeptide
EVQLVESGGGLVQPGGSLRLSCAASGFNIKDTYIHWVRQAPGKGLEWVARIYPTNGYTRYADSVKGRFTISADTSKNTAYLQMNSLRAEDTAVYYCSRWGGDGFYAMDYWGQGTLVTVSSA

SEQ ID NO: 481 - protein, 120 aa, Artificial Sequence
  Description of Artificial Sequence: Synthetic polypeptide
QVQLQQSGPELVKPGASLKLSCTASGFNIKDTYIHWVKQRPEQGLEWIGRIYPTNGYTRYDPKFQDKATITADTSSNTAYLQVSRLTSEDTAVYYCSRWGGDGFYAMDYWGQGASVTVSS

SEQ ID NO: 482 - protein, 119 aa, Artificial Sequence
  Description of Artificial Sequence: Synthetic polypeptide
QVQLVESGGGLVQPGGSLRLSCAASGFTFRSYAMSWVRQAPGKGLEWVSAISGRGDNTYYADSVKGRFTISRDNSKNTLYLQMNSLRAEDTAVYYCAKMTSNAFAFDYWGQGTLVTVSS

SEQ ID NO: 483 - protein, 119 aa, Artificial Sequence [sequence omitted]

SEQ ID NO: 484 - protein, 119 aa, Artificial Sequence [sequence omitted]

SEQ ID NO: 485 - protein, 121 aa, Artificial Sequence [sequence omitted]

SEQ ID NO: 486 - protein, 118 aa, Artificial Sequence
  Description of Artificial Sequence: Synthetic polypeptide
QVQLQESGGGLVKPGGSLRLSCAASGFTFSSYWMSWVRQAPGKGLEWVANINRDGSASYYVDSVKGRFTISRDDAKNSLYLQMNSLRAEDTAVYYCARDRGVGYFDLWGRGTLVTVSS

SEQ ID NO: 487 - protein, 129 aa, Artificial Sequence
  Description of Artificial Sequence: Synthetic polypeptide
QVQLVQSGAEVKKPGESLKISCKGSGYSFTSYWIAWVRQMPGKGLEYMGLIYPGDSDTKYSPSFQGQVTISVDKSVSTAYLQWSSLKPSDSAVYFCARHDVGYCTDRTCAKWPEWLGVWGQGTLVTVSS

SEQ ID NO: 488 - protein, 120 aa, Artificial Sequence
  Description of Artificial Sequence: Synthetic polypeptide
QVELVQSGAEVKKPGESLKISCKGSGYSFTSYWIGWVRQAPGKGLEWMGIIDPGDSRTRYSPSFQGQVTISADKSISTAYLQWSSLKASDTAMYYCARGQLYGGTYMDGWGQGTLVTVSS

SEQ ID NO: 489 - protein, 120 aa, Artificial Sequence
  Description of Artificial Sequence: Synthetic polypeptide
QVQLQQSGPELEKPGASVKISCKASGYSFTGYTMNWVKQSHGKSLEWIGLITPYNGASSYNQKFRGKATLTVDKSSSTAYMDLLSLTSEDSAVYFCARGGYDGRGFDYWGSGTPVTVSSA

SEQ ID NO: 490 - protein, 119 aa, Artificial Sequence
  Description of Artificial Sequence: Synthetic polypeptide
QVQLQQSGAEVKKFGASVKVSCEASGYTFPSYVLHWVKQAPGQGLEWIGYINPYNDGTQTNKKFKGKATLTRDTSINTAYMELSRLRSDDTAVYYCARGFGGSYGFAYNGQGTLVTVSS

SEQ ID NO: 491 - protein, 117 aa, Artificial Sequence
  Description of Artificial Sequence: Synthetic polypeptide
QAQLQVSGAEVVKPGASVKMSCKASGYTFTSYNMHWVKQTPGQGLEWIGYIYPGNGATNYNQKFQGKATLTADTSSSTAYMQISSLTSEDSAVYFCARGDSVPFAYWGQGTLVTVSA

SEQ ID NO: 492 - protein, 118 aa, Artificial Sequence
  Description of Artificial Sequence: Synthetic polypeptide
QVQLQQSGAELMKPGASVKISCKATGYTFSAYWIEWVKQRPGHGLEWIGEILPGSNNSRYNEKFKGKATFTADTSSNTAYMQLSSLTSEDSAVYYCSRSYDFAWFAYWGQGTPVTVSA

SEQ ID NO: 493 - protein, 118 aa, Artificial Sequence
  Description of Artificial Sequence: Synthetic polypeptide
QVQLVQSGAEVKKPGASVKVSCKASGYTFSAYWIEWVRQAPGKGLEWVGEILPGSNNSRYNEKFKGRVTVTRDTSTNTAYMELSSLRSEDTAVYYCARSYDFAWFAYWGQGTLVTVSS

SEQ ID NO: 494 - protein, 123 aa, Artificial Sequence
  Description of Artificial Sequence: Synthetic polypeptide
QVQLVQSGAEVKKPGSSVKVSCKTSGDTFSTYAISWVRQAPGQGLEWMGGIIPIFGKAHYAQKFQGRVTITADESTSTAYMELSSLRSEDTAVYFCARKFHFVSGSPFGMDVWGQGTTVTVSS

SEQ ID NO: 495 - protein, 121 aa, Artificial Sequence
  Description of Artificial Sequence: Synthetic polypeptide
EVQLVESGGGLVQPGGSLRLSCAASGFTFSRYWMSWVRQAPGKGLEWVANIKQDGSEKYYVDSVKGRFTISRDNAKNSLYLQMNSLRAEDTAVYYCAREGGWFGELAFDYWGQGTLVTVSS

SEQ ID NO: 496 - protein, 118 aa, Artificial Sequence [sequence omitted]

SEQ ID NO: 497 - protein, 120 aa, Artificial Sequence
  Description of Artificial Sequence: Synthetic polypeptide
EVQLLESGGGLVQPGGSLRLSCAASGFTFSSYIMMWVRQAPGKGLEWVSSIYPSGGITFYADTVKGRFTISRDNSKNTLYLQMNSLRAEDTAVYYCARIKLGTVTTVDYWGQGTLVTVSS

SEQ ID NO: 498 - protein, 115 aa, Artificial Sequence
  Description of Artificial Sequence: Synthetic polypeptide
EVQLVQSGPEVKKPGATVKISCKTSGYTFTEYTIHWVKQAPGKGLEWIGNINPNNGGTTYNQKFEDKATLTVDKSTDTAYMELSSLRSEDTAVYYCAAGWNFDYWGQGTLLTVSS

SEQ ID NO: 499 - protein, 121 aa, Artificial Sequence
  Description of Artificial Sequence: Synthetic polypeptide
QVQLVESGGGLVKPGESLRLSCAASGFTFSDYYMYWVRQAPGKGLEWVAIISDGGYYTYYSDIIKGRFTISRDNAKNSLYLQMNSLKAEDTAVYYCARGFPLLRHGAMDYWGQGTLVTVSS

SEQ ID NO: 500 - protein, 115 aa, Artificial Sequence
  Description of Artificial Sequence: Synthetic polypeptide
QVQLVQSGAEVVKPGASVKISCKASGYTFTDHAIHWVKQNPGQRLEWIGYFSPGNDDFKYNERFKGKATLTADTSASTAYVELSSLRSEDTAVYFCTRSLNMAYWGQGTLVTVSS

SEQ ID NO: 501 - protein, 126 aa, Artificial Sequence
  Description of Artificial Sequence: Synthetic polypeptide
QAQVVESGGGVVQSGRSLRLSCAASGFAFSSYGMHWVRQAPGKGLEWVAVIWYDGSNKYYADSVRGRFTISRDNSENTLYLQMNSLRAEDTAVYYCARDHYGSGVHHYFYYGLDVWGQGTTVTVSS

SEQ ID NO: 502 - protein, 117 aa, Artificial Sequence
  Description of Artificial Sequence: Synthetic polypeptide
EVQLVQSGGGLVKPGGSLRLSCAASGFTFSSYSMNWVRQAPGKGLEWVSSISSSSSYIYYADSVKGRFTISRDNAKNSLYLQMNSLRAEDTAVYYCARVTDAFDIWGQGTMVTVSSA

SEQ ID NO: 503 - protein, 117 aa, Artificial Sequence
  Description of Artificial Sequence: Synthetic polypeptide
EVQLVESGGGLVQPGGSLRLSCAASGFTFSSYGMSWVRQAPGKGLEWVATITSGGSYTYYVDSVKGRFTISRDNAKNTLYLQMNSLRAEDTAVYYCVRIGEDALDYWGQGTLVTVSS

SEQ ID NO: 504 - protein, 118 aa, Artificial Sequence
  Description of Artificial Sequence: Synthetic polypeptide
KVQLQQSGTELVKPGASVKVSCKASGYIFTEYIIHWVKQRSGQGLEWIGWLYPESNIIKYNEKFKDKATLTADKSSSTVYMELSRLTSEDSAVYFCTRHDGTNFDYWGQGTTLTVSSA

SEQ ID NO: 505 - protein, 119 aa, Artificial Sequence [sequence omitted]

SEQ ID NO: 506 - protein, 122 aa, Artificial Sequence [sequence omitted]

SEQ ID NO: 507 - protein, 119 aa, Artificial Sequence
  Description of Artificial Sequence: Synthetic polypeptide
QVQLVQSGGGVVQPGRSLRLSCKASGYTFTSYTMHWVRQAPGKGLEWIGYINPSSGYTKYNQKFKDRFTISADKSKSTAFLQMDSLRPEDTGVYFCARWQDYDVYFDYWGQGTPVTVSS

SEQ ID NO: 508 - protein, 119 aa, Artificial Sequence [sequence omitted]

SEQ ID NO: 509 - protein, 119 aa, Artificial Sequence
  Description of Artificial Sequence: Synthetic polypeptide
DIKLQQSGAELARPGASVKMSCKTSGYTFTRYTMHWVKQRPGQGLEWIGYINPSRGYTNYNQKFKDKATLTTDKSSSTAYMQLSSLTSEDSAVYYCARYYDDHYCLDYWGQGTTLTVSS

SEQ ID NO: 510 - protein, 119 aa, Artificial Sequence
  Description of Artificial Sequence: Synthetic polypeptide
DVQLVQSGAEVKKPGASVKVSCKASGYTFTRYTMHWVRQAPGQGLEWIGYINPSRGYTNYADSVKGRFTITTDKSTSTAYMELSSLRSEDTATYYCARYYDDHYCLDYWGQGTTVTVSS

SEQ ID NO: 511 - protein, 106 aa, Artificial Sequence [sequence omitted]

SEQ ID NO: 512 - protein, 107 aa, Artificial Sequence
  Description of Artificial Sequence: Synthetic polypeptide
EIVLTQSPGTLSLSPGERATLSCRASQSVSSTYLAWYQQKPGQAPRLLIYGASSRATGIPDRFSGSGSGTDFTLTISRLEPEDFAVYYCQHYDNSQTFGQGTKVEIK

SEQ ID NO: 513 - protein, 106 aa, Artificial Sequence
  Description of Artificial Sequence: Synthetic polypeptide
ENVLTQSPSSMSASVGDRVNIACSASSSVSYMHWFQQKPGKSPKLWIYSTSNLASGVPSRFSGSGSGTDYSLTISSMQPEDAATYYCQQRSSYPLTFGGGTKLEIK

SEQ ID NO: 514 - protein, 111 aa, Artificial Sequence
  Description of Artificial Sequence: Synthetic polypeptide
DIQLTQSPSSLSASVGDRVTITCRAGESVDIFGVGFLHWYQQKPGKAPKLLIYRASNLESGVPSRFSGSGSRTDFTLTISSLQPEDFATYYCQQTNEDPYTFGQGTKVEIK

SEQ ID NO: 515 - protein, 111 aa, Artificial Sequence; identical to SEQ ID NO: 514
  Description of Artificial Sequence: Synthetic polypeptide

SEQ ID NO: 516 - protein, 106 aa, Artificial Sequence
  Description of Artificial Sequence: Synthetic polypeptide
DIQLTQSPSSLSASVGDRVTITCKASQDVGTSVAWYQQKPGKAPKLLIYWTSTRHTGVPSRFSGSGSGTDFTFTISSLQPEDIATYYCQQYSLYRSFGQGTKVEIK

SEQ ID NO: 517 - protein, 107 aa, Artificial Sequence
  Description of Artificial Sequence: Synthetic polypeptide
QTVLSQSPAILSASPGEKVTMTCRASSSVTYIHWYQQKPGSSPKSWIYATSNLASGVPARFSGSGSGTSYSLTISRVEAEDAATYYCQHWSSKPPTFGGGTKLEIKR

SEQ ID NO: 518 - protein, 116 aa, Artificial Sequence
  Description of Artificial Sequence: Synthetic polypeptide
QAVLTQPASLSASPGASASLTCTLRRGINVGAYSIYWYQQKPGSPPQYLLRYKSDSDKQQGSGVSSRFSASKDASANAGILLISGLQSEDEADYYCMIWHSGASAVFGGGTKLTVL

SEQ ID NO: 519 - protein, 111 aa, Artificial Sequence
  Description of Artificial Sequence: Synthetic polypeptide
DIQLTQSPASLAVSLGQRATISCKASQSVDYDGDSYLNWYQQIPGQPPKLLIYDASNLVSGIPPRFSGSGSGTDFTLNIHPVEKVDAATYHCQQSTEDPWTFGGGTKLEIK

SEQ ID NO: 520 - protein, 108 aa, Artificial Sequence
  Description of Artificial Sequence: Synthetic polypeptide
EIVLTQSPATLSLSPGERATLSCRASQSVSSYLAWYQQKPGQAPRLLIYDASNRATGIPARFSGSGSGTDFTLTISSLEPEDFAVYYCQQRSNWPITFGQGTRLEIKR

SEQ ID NO: 521 - protein, 106 aa, Artificial Sequence [sequence omitted]

SEQ ID NO: 522 - protein, 112 aa, Artificial Sequence
  Description of Artificial Sequence: Synthetic polypeptide
DIVMTQTPLSLPVTPGEPASISCRSSKSLLHSNGITYLYWYLQKPGQSPQLLIYQMSNLVSGVPDRFSGSGSGTDFTLKISRVEAEDVGVYYCAQNLELPYTFGGGTKVEIK

SEQ ID NO: 523 - protein, 107 aa, Artificial Sequence
  Description of Artificial Sequence: Synthetic polypeptide
DIQMTQSPSSLSASVGDRVTITCRASSSVSYMHWYQQKPGKAPKPLIYAPSNLASGVPSRFSGSGSGTDFTLTISSLQPEDFATYYCQQWSFNPPTFGQGTKVEIKR

SEQ ID NO: 524 - protein, 107 aa, Artificial Sequence
  Description of Artificial Sequence: Synthetic polypeptide
QIVLSQSPAILSASPGEKVTMTCRASSSVSYIHWFQQKPGSSPKPWIYATSNLASGVPVRFSGSGSGTSYSLTISRVEAEDAATYYCQQWTSNPPTFGGGTKLEIKR

SEQ ID NO: 525 - protein, 106 aa, Artificial Sequence [sequence omitted]

SEQ ID NO: 526 - protein, 113 aa, Artificial Sequence
  Description of Artificial Sequence: Synthetic polypeptide
DIQLTQSPSTLSASVGDRVTITCRASESLDNYGIRFLTWFQQKPGKAPKLLMYAASNQGSGVPSRFSGSGSGTEFTLTISSLQPDDFATYYCQQTKEVPWSFGQGTKVEVKRT

SEQ ID NO: 527 - protein, 107 aa, Artificial Sequence [sequence omitted]

SEQ ID NO: 528 - protein, 107 aa, Artificial Sequence
  Description of Artificial Sequence: Synthetic polypeptide
DIQMTQSPSSVSASVGDRVTITCRASQGINTWLAWYQQKPGKAPKLLIYAASSLKSGVPSRFSGSGSGTDFTLTISSLQPEDFATYYCQQANSFPLTFGGGTKVEIK

SEQ ID NO: 529 - protein, 108 aa, Artificial Sequence [sequence omitted]

SEQ ID NO: 530 - protein, 114 aa, Artificial Sequence
  Description of Artificial Sequence: Synthetic polypeptide
DIQMTQSPSSLSASVGDRVTITCKSSQSLLYTSSQKNYLAWYQQKPGKAPKLLIYWASTRESGVPSRFSGSGSGTDFTLTISSLQPEDFATYYCQQYYAYPWTFGQGTKVEIKR

SEQ ID NO: 531 - protein, 108 aa, Artificial Sequence
  Description of Artificial Sequence: Synthetic polypeptide
DIQMTQSPSSLSASVGDRVTITCRASQSINSYLDWYQQKPGKAPKLLIYAASSLQSGVPSRFSGSGSGTDFTLTISSLQPEDFATYYCQQYYSTPFTFGPGTKVEIKR

SEQ ID NO: 532 - protein, 108 aa, Artificial Sequence
  Description of Artificial Sequence: Synthetic polypeptide
EIVLTQSPGTLSLSPGERATLSCRASQSVGSSYLAWYQQKPGQAPRLLIYGAFSRATGIPDRFSGSGSGTDFTLTISRLEPEDFAVYYCQQYGSSPWTFGQGTKVEIK

SEQ ID NO: 533 - protein, 113 aa, Artificial Sequence
  Description of Artificial Sequence: Synthetic polypeptide
ELVMTQSPSSLTVTAGEKVTMSCKSSQSLLNSGNQKNYLTWYQQKPGQPPKLLIYWASTRESGVPDRFTGSGSGTDFTLTISSVQAEDLAVYYCQNDYSYPLTFGAGTKLEIK

SEQ ID NO: 534 - protein, 107 aa, Artificial Sequence
  Description of Artificial Sequence: Synthetic polypeptide
ELQMTQSPSSLSASVGDRVTITCRTSQSISSYLNWYQQKPGQPPKLLIYWASTRESGVPDRFSGSGSGTDFTLTISSLQPEDSATYYCQQSYDIPYTFGQGTKLEIK

SEQ ID NO: 535 - protein, 107 aa, Artificial Sequence
  Description of Artificial Sequence: Synthetic polypeptide
NIVMTQSPKSMSMSVGERVTLTCKASENVVTYVSWYQQKPEQSPKLLIYGASNRYTGVPDRFTGSGSATDFTLTISSVQAEDLADYHCGQGYSYPYTFGGGTKLEIK

SEQ ID NO: 536 - protein, 106 aa, Artificial Sequence
  Description of Artificial Sequence: Synthetic polypeptide
QILLTQSPAIMSASPGEKVTMTCSASSSVSYMLWYQQKPGSSPKPWIFDTSNLASGFPARFSGSGSGTSYSLIISSMEAEDAATYYCHQRSGYPYTFGGGTKLEIK

SEQ ID NO: 537 - protein, 118 aa, Artificial Sequence
  Description of Artificial Sequence: Synthetic polypeptide
DIVMTQSPDSLAVSLGERATINCKSSQSVLYSSNNKNYLAWYQQKPGQPPKLLIYWASTRESGVPDRFSGSGSGTDFTLTISSLQAEDVAVYYCQQYYSYPLTFGGGTKVKESGSVSS

SEQ ID NO: 538 - protein, 113 aa, Artificial Sequence
  Description of Artificial Sequence: Synthetic polypeptide
DIVMTQSPLSLPVTPGEPASISCRSSINKKGSNGITYLYWYLQKPGQSPQLLIYQMSNLASGVPDRFSGSGSGTDFTLKISRVEAEDVGVYYCAQNLEIPRTFGQGTKVEIKR

SEQ ID NO: 539 - protein, 113 aa, Artificial Sequence
  Description of Artificial Sequence: Synthetic polypeptide
DIQMTQSPSSLSASVGDRVTITCRSTKSLLHSNGITYLYWYQQKPGKAPKLLIYQMSNLASGVPSRFSSSGSGTDFTLTISSLQPEDFATYYCAQNLEIPRTFGQGTKVEIKR

SEQ ID NO: 540 - protein, 108 aa, Artificial Sequence
  Description of Artificial Sequence: Synthetic polypeptide
DIQMTQSPSSLSASVGDRVTITCRASQSISTWLAWYQQKPGKAPKLLIYKASNLHTGVPSRFSGSGSGTEFSLTISGLQPDDFATYYCQQYNSYSRTFGQGTKVEIKR

SEQ ID NO: 541 - protein, 110 aa, Artificial Sequence
  Description of Artificial Sequence: Synthetic polypeptide
DIQLTQSPSSLSASVGDRVTITCSVSSSISSNNLHWYQQKPGKAPKPWIYGTSNLASGVPSRFSGSGSGTDYTFTISSLQPEDIATYYCQQWSSYPYMYTFGQGTKVEIK

SEQ ID NO: 542 - protein, 112 aa, Artificial Sequence
  Description of Artificial Sequence: Synthetic polypeptide
DIVLTQSPLSLAVSLGQPAIISCKASQSVSFAGTSLMHWYHQKPGQQPRLLIYRASNLEAGVPDRFSGSGSKTDFTLNISPVEAEDAATYYCQQSREYPYTFGGGTKLEIKR

SEQ ID NO: 543 - protein, 112 aa, Artificial Sequence
  Description of Artificial Sequence: Synthetic polypeptide
DIVLTQSPLSLAVSLGQPAIISCKASQSVSFAGTSLMHWYHQKPGQQPRLLIYRASNLEAGVPDRFSGSGSKTDFTLTISPVEAEDAATYYCQQSREYPYTFGGGTKLEIKR

SEQ ID NO: 544 - protein, 100 aa, Artificial Sequence
  Description of Artificial Sequence: Synthetic polypeptide
PASLSASVGETVTITCRTSENIFSYLAWYQQKQGISPQLLVYNAKTLAEGVPSRFSGSGSGTQFSLKINSLQPEDFGSYYCQHHYAFPWTFGGGSKLEIK

SEQ ID NO: 545 - protein, 112 aa, Artificial Sequence
  Description of Artificial Sequence: Synthetic polypeptide
DTVMTQTPLSSHVTLGQPASISCRSSQSLVHSDGNTYLSWLQQRPGQPPRLLIYRISRRFSGVPDRFSGSGAGTDFTLEISRVEAEDVGVYYCMQSTHVPRTFGQGTKVEIK

SEQ ID NO: 546 - protein, 108 aa, Artificial Sequence
  Description of Artificial Sequence: Synthetic polypeptide
DILLTQSPVILSVSPGERVSFSCRASQSIGTNIHWYQQRTNGSPRLLIKYASESISGIPSRFSGSGSGTDFTLSINSVESEDIADYYCQQNNNWPTTFGAGTKLELKR

SEQ ID NO: 547 - protein, 108 aa, Artificial Sequence
  Description of Artificial Sequence: Synthetic polypeptide
DIQMTQSPSSLSASVGDRVTITCRASQGINNYLNWYQQKPGKAPKRLIYNTNNLQTGVPSRFSGSGSGTEFTLTISSLQPEDFATYYCLQHNSFPTFGQGTKLEIKRT

SEQ ID NO: 548 - protein, 107 aa, Artificial Sequence [sequence omitted]

SEQ ID NO: 549 - protein, 107 aa, Artificial Sequence [sequence omitted]

SEQ ID NO: 550 - protein, 107 aa, Artificial Sequence
  Description of Artificial Sequence: Synthetic polypeptide
DIQMTQSPSTLSASVGDRVTITCRASQSISSWWAWYQQKPGKAPKLLIYDASSLESGVPSRFSGSGSGTEFTLTISSLQPDDFATYYCQQYHAHPTTFGGGTKVEIK

SEQ ID NO: 551 - protein, 113 aa, Artificial Sequence
  Description of Artificial Sequence: Synthetic polypeptide
DIVMTQSPDSLAVSLGERATINCKSSQSVLYSPNNKNYLAWYQQKPGQPPKLLIYWASTRESGVPDRFSGSGSGTDFTLTISSLQAEDVAVYYCQQYYGSPITFGGGTKVEIK

SEQ ID NO: 552 - protein, 108 aa, Artificial Sequence
  Description of Artificial Sequence: Synthetic polypeptide
EIVMTQSPATLSVSPGERATLSCRASQSVSSNLAWYQQKPGQAPRLLIYGASTRATGIPARFSGSGSGTEFTLTISSLQSEDFAVYYCQDYRTWPRRVFGGGTKVEIK

SEQ ID NO: 553 - protein, 112 aa, Artificial Sequence [sequence omitted]

SEQ ID NO: 554 - protein, 108 aa, Artificial Sequence
  Description of Artificial Sequence: Synthetic polypeptide
DIQMTQSPSSLSASVGDRVTITCQASQDISNYLNWYQQKPGKAPKLLIYDASNLETGVPSRFSGSGSGTDFTFTISSLQPEDIATYFCQHFDHLPLAFGGGTKVEIKR

SEQ ID NO: 555 - protein, 112 aa, Artificial Sequence
  Description of Artificial Sequence: Synthetic polypeptide
DVVMTQTPLSLPVSLGDQASISCRSSQSLVHSNGNTYLHWYLQKPGQSPKLLIYKVSNRFSGVPDRFSGSGSGTDFTLKISRVEAEDLGVYFCSQSTHVPWTFGGGTKLEIK

SEQ ID NO: 556 - protein, 111 aa, Artificial Sequence
  Description of Artificial Sequence: Synthetic polypeptide
DVVMTQTPLSLPVSLGDQASISCRSSQSLVHSNGNTYLHWYLQKPGQSPKLLIYKVSNRFSGVPDRFSGSGSGTDFTLKISRVEAEDLGVYFCSQSTHVLTFGSGTKLEIK

SEQ ID NO: 557 - protein, 103 aa, Artificial Sequence
  Description of Artificial Sequence: Synthetic polypeptide
QSPSFLSAFVGDRITITCRASPGIRNYLAWYQQKPGKAPKLLIYAASTLQSGVPSRFSGSGSGTDFTLTISSLQPEDFATYYCQQYNSYPLSFGGGTKVEIKR

SEQ ID NO: 558 - protein, 111 aa, Artificial Sequence
  Description of Artificial Sequence: Synthetic polypeptide
QAVVTQEPSFSVSPGGTVTLTCGLSSGSVSTSYYPSWYQQTPGQAPRTLIYSTNTRSSGVPDRFSGSILGNKAALTITGAQADDESDYYCVLYMGSGQYVFGGGTKLTVLG

SEQ ID NO: 559 - protein, 108 aa, Artificial Sequence
  Description of Artificial Sequence: Synthetic polypeptide
DIQMTQSPSSLSASVGDRVTITCRASQDVNTAVAWYQQKPGKAPKLLIYSASFLYSGVPSRFSGSRSGTDFTLTISSLQPEDFATYYCQQHYTTPPTFGQGTKVEIKR

SEQ ID NO: 560 - protein, 107 aa, Artificial Sequence
  Description of Artificial Sequence: Synthetic polypeptide
DIVMTQSHKFMSTSVGDRVSITCKASQDVNTAVAWYQQKPGHSPKLLIYSASFRYTGVPDRFTGSRSGTDFTFTISSVQAEDLAVYYCQQHYTTPPTFGGGTKVEIK

SEQ ID NO: 561 - protein, 112 aa, Artificial Sequence
  Description of Artificial Sequence: Synthetic polypeptide
QSVLTQPPSVSGAPGQRVTISCTGSSSNIGAGYGVHWYQQLPGTAPKLLIYGNTNRPSGVPDRFSGFKSGTSASLAITGLQAEDEADYYCQFYDSSLSGWVFGGGTKLTVLG

SEQ ID NO: 562 - protein, 109 aa, Artificial Sequence
  Description of Artificial Sequence: Synthetic polypeptide
DIQMTQSPSSLSASVGDRVTITCKASQDVSIGVAWYQQKPGKAPKLLIYSASYRYTGVPSRFSGSGSGTDFTLTISSLQPEDFATYYCQQYYIYPYTFGQGTKVEIKRT

SEQ ID NO: 563 - protein, 111 aa, Artificial Sequence [sequence omitted]

SEQ ID NO: 564 - protein, 108 aa, Artificial Sequence
  Description of Artificial Sequence: Synthetic polypeptide
DIQMTQSPSSLSASVGDRVTITCRASQNIATDVAWYQQKPGKAPKLLIYSASFLYSGVPSRFSGSGSGTDFTLTISSLQPEDFATYYCQQSEPEPYTFGQGTKVEIKR

SEQ ID NO: 565 - protein, 112 aa, Artificial Sequence
  Description of Artificial Sequence: Synthetic polypeptide
QSALTQPASVSGSPGQSITISCTGTSSDVGGYNFVSWYQQHPGKAPKLMIYDVSDRPSGVSDRFSGSKSGNTASLIISGLQADDEADYYCSSYGSSSTHVIFGGGTKVTVLG

SEQ ID NO: 566 - protein, 111 aa, Artificial Sequence
  Description of Artificial Sequence: Synthetic polypeptide
QSVLTQPPSVSAAPGQKVTISCSGSSSNIGNNYVSWYQQLPGTAPKLLIYDHTNRPAGVPDRFSGSKSGTSASLAISGFRSEDEADYYCASWDYTLSGWVFGGGTKLTVLG

SEQ ID NO: 567 - protein, 111 aa, Artificial Sequence
  Description of Artificial Sequence: Synthetic polypeptide
DIALTQPASVSGSPGQSITISCTGTSSDIGGYNSVSWYQQHPGKAPKLMIYGVNNRPSGVSNRFSGSKSGNTASLTISGLQAEDEADYYCSSYDIESATPVFGGGTKLTVL

SEQ ID NO: 568 - protein, 107 aa, Artificial Sequence
  Description of Artificial Sequence: Synthetic polypeptide
DIELTQSPAIMSASPGEKVTMTCSASSSVSYMHWYQQKSGTSPKRWIYDTSKLASGVPGRFSGSGSGNSYSLTISSVEAEDDATYYCQQWSKHPLTFGSGTKVEIKR

SEQ ID NO: 569 - protein, 108 aa, Artificial Sequence
  Description of Artificial Sequence: Synthetic polypeptide
DIQLTQSPSSLSASVGDRVTMTCSASSSVSSSYLYWYQQKPGKAPKLWIYSTSNLASGVPARFSGSGSGTDFTLTISSLQPEDSASYFCHQWNRYPYTFGGGTRLEIK

SEQ ID NO: 570 - protein, 107 aa, Artificial Sequence
  Description of Artificial Sequence: Synthetic polypeptide
EIVLTQSPATMSASPGERVTITCSAHSSVSFMHWFQQKPGTSPKLWIYSTSSLASGVPARFGGSGSGTSYSLTISSMEAEDAATYYCQQRSSFPLTFGAGTKLELKR

SEQ ID NO: 571 - protein, 114 aa, Artificial Sequence
  Description of Artificial Sequence: Synthetic polypeptide
DIVMSQSPSSLAVSVGEKVTMSCKSSQSLLYSSNQKIYLAWYQQKPGQSPKLLIYWASTRESGVPDRFTGGGSGTDFTLTISSVKAEDLAVYYCQQYYRYPRTFGGGTKLEIKR

SEQ ID NO: 572 - protein, 114 aa, Artificial Sequence
  Description of Artificial Sequence: Synthetic polypeptide
DIQMTQSPSSLSASVGDRVTITCKSSQSLLYSSNQKIYLAWYQQKPGKAPKLLIYWASTRESGVPSRFSGSGSGTDFTFTISSLQPEDIATYYCQQYYRYPRTFGQGTKVEIKR

SEQ ID NO: 573 - protein, 106 aa, Artificial Sequence
  Description of Artificial Sequence: Synthetic polypeptide
EIVLTQSPATLSLSPGERATLSCRASQSVSSYLAWYQQKPGQAPRLLIYDASNRATGIPARFSGSGSGTDFTLTISSLEPEDFAVYYCQQRSNWPTFGQGTKVEIK

SEQ ID NO: 574 - protein, 108 aa, Artificial Sequence
  Description of Artificial Sequence: Synthetic polypeptide
EIVLTQSPGTLSLSPGERATLSCRASQRVSSSYLAWYQQKPGQAPRLLIYDASSRATGIPDRFSGSGSGTDFTLTISRLEPEDFAVYYCQQYGSLPWTFGQGTKVEIK

SEQ ID NO: 575 - protein, 107 aa, Artificial Sequence [sequence omitted]

SEQ ID NO: 576 - protein, 110 aa, Artificial Sequence
  Description of Artificial Sequence: Synthetic polypeptide
QSALTQPASVSGSPGQSITISCTGTSSDVGGYNYVSWYQQHPGKAPKLMIYDVSNRPSGVSNRFSGSKSGNTASLTISGLQAEDEADYYCSSYTSSSTRVFGTGTKVTVL

SEQ ID NO: 577 - protein, 107 aa, Artificial Sequence
  Description of Artificial Sequence: Synthetic polypeptide
DIQMTQSPSSLSTSVGDRVTLTCKASQDVGTAVDWYQQKPGPSPKLLIYWASTRHTGIPSRFSGSGSGTDFTLTISSLQPEDFADYYCQQYNSYPLTFGPGTKVDIK

SEQ ID NO: 578 - protein, 107 aa, Artificial Sequence
  Description of Artificial Sequence: Synthetic polypeptide
DIQMTQSPSSLSASVGDRVTITCKASQNVDTNVAWYQQKPGQAPKSLIYSASYRYSDVPSRFSGSASGTDFTLTISSVQSEDFATYYCQQYDSYPYTFGGGTKLEIK

SEQ ID NO: 579 - protein, 113 aa, Artificial Sequence
  Description of Artificial Sequence: Synthetic polypeptide
DIVMSQSPDSLAVSLGERVTLNCKSSQSLLYSGNQKNYLAWYQQKPGQSPKLLIYWASARESGVPDRFSGSGSGTDFTLTISSVQAEDVAVYYCQQYYSYPLTFGAGTKLELK

SEQ ID NO: 580 - protein, 108 aa, Artificial Sequence
  Description of Artificial Sequence: Synthetic polypeptide
EIVLTQSPGTLSLSPGERATLSCRASQSVSSSYLAWYQQKPGQAPRLLIYGASSRATGIPDRFSGSGSGTDFTLTISRLEPEDFAVYYCQQYGSSPLTFGGGTKVEIK

SEQ ID NO: 581 - protein, 108 aa, Artificial Sequence
  Description of Artificial Sequence: Synthetic polypeptide
DIQMTQSPSSVSASIGDRVTITCRASQGIDNWLGWYQQKPGKAPKLLIYDASNLDTGVPSRFSGSGSGTYFTLTISSLQAEDFAVYFCQQAKAFPPTFGGGTKVDIKR

SEQ ID NO: 582 - protein, 107 aa, Artificial Sequence
  Description of Artificial Sequence: Synthetic polypeptide
DIQMTQSPSSLSASVGDRVTITCRASQDIAGSLNWLQQKPGKAIKRLIYATSSLDSGVPKRFSGSRSGSDYTLTISSLQPEDFATYYCLQYGSFPPTFGQGTKVEIK

SEQ ID NO: 583 - protein, 112 aa, Artificial Sequence
  Description of Artificial Sequence: Synthetic polypeptide
DIVLTQSPASLAVSLGQRATISCRASESVDSYGNSFMHWYQQKPGQPPKLLIYRASNLESGIPARFSGSGSRTDFTLTINPVEADDVATYYCQQSNEDPLTFGAGTKLELKR

SEQ ID NO: 584 - protein, 107 aa, Artificial Sequence
  Description of Artificial Sequence: Synthetic polypeptide
DIQMTQSPSSLSASVGDRVTITCSASSSVSYMNWYQQTPGKAPKRWIYDTSKLASGVPSRFSGSGSGTDYTFTISSLQPEDIATYYCQQWSSNPFTFGQGTKLQITR

SEQ ID NO: 585 - protein, 107 aa, Artificial Sequence [sequence omitted]

SEQ ID NO: 586 - protein, 107 aa, Artificial Sequence
  Description of Artificial Sequence: Synthetic polypeptide
DIQMTQSPSSLSASVGDRVTMTCRASSSVSYMHWYQQTPGKAPKPWIYATSNLASGVPSRFSGSGSGTDYTLTISSLQPEDIATYYCQQWSSNPPTFGQGTKLQITR

SEQ ID NO: 587 - protein, 107 aa, Artificial Sequence
  Description of Artificial Sequence: Synthetic polypeptide
QIVLTQSPAIMSASPGEKVTMTCSASSSVSYMNWYQQKSGTSPKRWIYDTSKLASGVPAHFRGSGSGTSYSLTISGMEAEDAATYYCQQWSSNPFTFGSGTKLEINR

SEQ ID NO: 588 - protein, 106 aa, Artificial Sequence
  Description of Artificial Sequence: Synthetic polypeptide
DIQLTQSPAIMSASPGEKVTMTCRASSSVSYMNWYQQKSGTSPKRWIYDTSKVASGVPYRFSGSGSGTSYSLTISSMEAEDAATYYCQQWSSNPLTFGAGTKLELK

SEQ ID NO: 589 - protein, 106 aa, Artificial Sequence
  Description of Artificial Sequence: Synthetic polypeptide
DIVLTQSPATLSLSPGERATLSCRASQSVSYMNWYQQKPGKAPKRWIYDTSKVASGVPARFSGSGSGTDYSLTINSLEAEDAATYYCQQWSSNPLTFGGGTKVEIK

SEQ ID NO: 590 - protein, 30 aa, Artificial Sequence
  Description of Artificial Sequence: Synthetic polypeptide
GSGEGSEGEGGGEGSEGEGSGEGGEGEGSG

SEQ ID NO: 591 - protein, 20 aa, Artificial Sequence
  Description of Artificial Sequence: Synthetic peptide
GGGGSGGGGSGGGGSGGGGS

SEQ ID NO: 592 - protein, 15 aa, Artificial Sequence
  Description of Artificial Sequence: Synthetic peptide
GGGGSGGGGSGGGGS

SEQ ID NO: 593 - protein, 30 aa, Artificial Sequence
  Description of Artificial Sequence: Synthetic polypeptide
AGSPTSTEEGTSESATPESGPGSEPATSGS

SEQ ID NO: 594 - protein, 30 aa, Artificial Sequence
  Description of Artificial Sequence: Synthetic polypeptide
GTSTEPSEGSAPGTSESATPESGPGSEPAT

SEQ ID NO: 595 - protein, 30 aa, Artificial Sequence
  Description of Artificial Sequence: Synthetic polypeptide
GSETPGTSESATPESGPGTSTEPSEGSAPG

SEQ ID NO: 596 - protein, 30 aa, Artificial Sequence
  Description of Artificial Sequence: Synthetic polypeptide
GTGPGTPGSGTASSSPGSSTPSGATGSPGP

SEQ ID NO: 597 - protein, 30 aa, Artificial Sequence
  Description of Artificial Sequence: Synthetic polypeptide
GSGTASSSPGSSTPSGATGSPGSSPSASTG

SEQ ID NO: 598 - protein, 30 aa, Artificial Sequence
  Description of Artificial Sequence: Synthetic polypeptide
GASPGTSSTGSPGTPGSGTASSSPGSSTPS

SEQ ID NO: 599 - protein, 30 aa, Artificial Sequence
  Description of Artificial Sequence: Synthetic polypeptide
GTSSTGSPGTPGSGTASSSPGSSTPSGATG

SEQ ID NO: 600 - protein, 10 aa, Artificial Sequence
  Description of Artificial Sequence: Synthetic peptide
  MOD_RES (1)..(1): pyroGlu
  C-term NH2
XHWSYGLRPG

SEQ ID NO: 601 - protein, 10 aa, Artificial Sequence
  Description of Artificial Sequence: Synthetic peptide
  MOD_RES (1)..(1): pyroGlu
  C-term NH2
XHWSHDWLPG

SEQ ID NO: 602 - protein, 6 aa, Artificial Sequence
  Description of Artificial Sequence: Synthetic cyclic peptide
  MOD_RES (3)..(3): iso-Asp
CGXGRG

SEQ ID NO: 603 - protein, 5 aa, Artificial Sequence
  Description of Artificial Sequence: Synthetic peptide
GNGRG

SEQ ID NO: 604 - protein, 5 aa, Artificial Sequence
  Description of Artificial Sequence: Synthetic cyclic peptide
CNGRC

SEQ ID NO: 605 - protein, 7 aa, Artificial Sequence
  Description of Artificial Sequence: Synthetic peptide
  N-term Ac
  C-term NH2
CSPCSPC

SEQ ID NO: 606 - protein, 7 aa, Artificial Sequence
  Description of Artificial Sequence: Synthetic peptide
  N-term Ac
  C-term NH2
KSPKSPK

SEQ ID NO: 607 - protein, 16 aa, Artificial Sequence
  Description of Artificial Sequence: Synthetic peptide
  N-term Ac
  MOD_RES (1)..(1): Epsilon-amino group modified to azide, maleimide, iodoacetyl, or bromoacetyl
  MOD_RES (4)..(4): Epsilon-amino group modified to azide, maleimide, iodoacetyl, or bromoacetyl
  MOD_RES (4)..(15): May or may not be present
  MOD_RES (7)..(7): Epsilon-amino group modified to azide, maleimide, iodoacetyl, or bromoacetyl
  MOD_RES (10)..(10): Epsilon-amino group modified to azide, maleimide, iodoacetyl, or bromoacetyl
  MOD_RES (13)..(13): Epsilon-amino group modified to azide, maleimide, iodoacetyl, or bromoacetyl
  MOD_RES (16)..(16): Epsilon-amino group modified to azide, maleimide, iodoacetyl, or bromoacetyl
  MISC_FEATURE (1)..(15): This region may encompass 1, 2, 3, 4 or 5 "Lys Ser Pro" repeating units
  C-term NH2
  See specification as filed for detailed description of substitutions and preferred embodiments
KSPKSPKSPKSPKSPK

SEQ ID NO: 608 - protein, 5 aa, Artificial Sequence
  Description of Artificial Sequence: Synthetic peptide
GQQQL

SEQ ID NO: 609 - protein, 5 aa, Artificial Sequence
  Description of Artificial Sequence: Synthetic peptide
LPETG

SEQ ID NO: 610 - protein, 6 aa, Artificial Sequence
  Description of Artificial Sequence: Synthetic peptide
LPETGG

SEQ ID NO: 611 - protein, 4 aa, Artificial Sequence
  Description of Artificial Sequence: Synthetic peptide
GFLG

SEQ ID NO: 612 - protein, 7 aa, Artificial Sequence
  Description of Artificial Sequence: Synthetic peptide
  N-term epsilon-maleimidocaproyl
  C-term PABC-paclitaxel
RSSYYSL

SEQ ID NO: 613 - protein, 10 aa, Artificial Sequence
  Description of Artificial Sequence: Synthetic peptide
WGQGTLVTVS

SEQ ID NO: 614 - protein, 11 aa, Artificial Sequence
  Description of Artificial Sequence: Synthetic peptide
TFGQGTKVEIK

SEQ ID NO: 615 - protein, 10 aa, Artificial Sequence
  Description of Artificial Sequence: Synthetic peptide
EVQLVESGGG

SEQ ID NO: 616 - protein, 10 aa, Artificial Sequence
  Description of Artificial Sequence: Synthetic peptide
DIQMTQSPSS

SEQ ID NO: 617 - protein, 324 aa, Artificial Sequence
  Description of Artificial Sequence: Synthetic polypeptide
WGQGTLVTVSGSPGAGSCAGLSGRSDNHSPLGLAGSPGSPAGSPTSTEEGTSESATPESGPGTSTEPSEGSAPGSPAGSPTSTEEGTSTEPSEGSAPGTSTEPSEGSAPGTSESATPESGPGSEPATSGSETPGSEPATSGSETPGSPAGSPTSTEEGTSESATPESGPGTSTEPSEGSAPGTSTEPSEGSAPGSPAGSPTSTEEGTSTEPSEGSAPGTSTEPSEGSAPGTSESATPESGPGTSTEPSEGSAPGTSESATPESGPGSEPATSGSETPGTSTEPSEGSAPGTSTEPSEGSAPGTSESATPESGPGTSESATPESG

SEQ ID NO: 618 - protein, 320 aa, Artificial Sequence
  Description of Artificial Sequence: Synthetic polypeptide
WGQGTLVTVSGAPCGALSGRSDNHSPLGLAGSPGSPAGSPTSTEEGTSESATPESGPGTSTEPSEGSAPGSPAGSPTSTEEGTSTEPSEGSAPGTSTEPSEGSAPGTSESATPESGPGSEPATSGSETPGSEPATSGSETPGSPAGSPTSTEEGTSESATPESGPGTSTEPSEGSAPGTSTEPSEGSAPGSPAGSPTSTEEGTSTEPSEGSAPGTSTEPSEGSAPGTSESATPESGPGTSTEPSEGSAPGTSESATPESGPGSEPATSGSETPGTSTEPSEGSAPGTSTEPSEGSAPGTSESATPESGPGTSESATPESG

SEQ ID NO: 619 - protein, 356 aa, Artificial Sequence
  Description of Artificial Sequence: Synthetic polypeptide
WGQGTLVTVSGSPGAGSCAGSPTSTEEGTSESACSPEGPGTSTEPSEGSCGGLSGRSDNHSPLGLAGSPGSPAGSPTSTEEGTSESATPESGPGTSTEPSEGSAPGSPAGSPTSTEEGTSTEPSEGSAPGTSTEPSEGSAPGTSESATPESGPGSEPATSGSETPGSEPATSGSETPGSPAGSPTSTEEGTSESATPESGPGTSTEPSEGSAPGTSTEPSEGSAPGSPAGSPTSTEEGTSTEPSEGSAPGTSTEPSEGSAPGTSESATPESGPGTSTEPSEGSAPGTSESATPESGPGSEPATSGSETPGTSTEPSEGSAPGTSTEPSEGSAPGTSESATPESGPGTSESATPESG

SEQ ID NO: 620 - protein, 328 aa, Artificial Sequence
  Description of Artificial Sequence: Synthetic polypeptide
WGQGTLVTVSGAPCGAGCAGPCGPLSGRSDNHSPLGLAGSPGSPAGSPTSTEEGTSESATPESGPGTSTEPSEGSAPGSPAGSPTSTEEGTSTEPSEGSAPGTSTEPSEGSAPGTSESATPESGPGSEPATSGSETPGSEPATSGSETPGSPAGSPTSTEEGTSESATPESGPGTSTEPSEGSAPGTSTEPSEGSAPGSPAGSPTSTEEGTSTEPSEGSAPGTSTEPSEGSAPGTSESATPESGPGTSTEPSEGSAPGTSESATPESGPGSEPATSGSETPGTSTEPSEGSAPGTSTEPSEGSAPGTSESATPESGPGTSESATPESG

SEQ ID NO: 621 - protein, 458 aa, Artificial Sequence
  Description of Artificial Sequence: Synthetic polypeptide
WGQGTLVTVSGSPGAGSCAGSPTSTEEGTSESACSPEGPGTSTEPSEGSCGPSPAGSPTSTEEGTCTEPSEGSAPGTSEPTCSGSAPGTSESATPESCGPSEPATSGSETPGSCAPTSGSETPGSPAGSCTSTEEGTSESATPESCGPTESASGLSGRSDNHSPLGLAGSPGSPAGSPTSTEEGTSESATPESGPGTSTEPSEGSAPGSPAGSPTSTEEGTSTEPSEGSAPGTSTEPSEGSAPGTSESATPESGPGSEPATSGSETPGSEPATSGSETPGSPAGSPTSTEEGTSESATPESGPGTSTEPSEGSAPGTSTEPSEGSAPGSPAGSPTSTEEGTSTEPSEGSAPGTSTEPSEGSAPGTSESATPESGPGTSTEPSEGSAPGTSESATPESGPGSEPATSGSETPGTSTEPSEGSAPGTSTEPSEGSAPGTSESATPESGPGTSESATPESG

SEQ ID NO: 622 - protein, 394 aa, Artificial Sequence
  Description of Artificial Sequence: Synthetic polypeptide
WGQGTLVTVSGSPGAGSCTETSPSTCPTESPEACGSGSGSPCSPSGTEACSTSGSEGCSPSSTAPCGPTETEGCTTSSGPPCPESATSEGLSGRSDNHSPLGLAGSPGSPAGSPTSTEEGTSESATPESGPGTSTEPSEGSAPGSPAGSPTSTEEGTSTEPSEGSAPGTSTEPSEGSAPGTSESATPESGPGSEPATSGSETPGSEPATSGSETPGSPAGSPTSTEEGTSESATPESGPGTSTEPSEGSAPGTSTEPSEGSAPGSPAGSPTSTEEGTSTEPSEGSAPGTSTEPSEGSAPGTSESATPESGPGTSTEPSEGSAPGTSESATPESGPGSEPATSGSETPGTSTEPSEGSAPGTSTEPSEGSAPGTSESATPESGPGTSESATPESG

SEQ ID NO: 623 - protein, 324 aa, Artificial Sequence
  Description of Artificial Sequence: Synthetic polypeptide
WGQGTLVTVSGSPGAGSCAGSPLGLAGSLSGRSDNHPGSPAGSPTSTEEGTSESATPESGPGTSTEPSEGSAPGSPAGSPTSTEEGTSTEPSEGSAPGTSTEPSEGSAPGTSESATPESGPGSEPATSGSETPGSEPATSGSETPGSPAGSPTSTEEGTSESATPESGPGTSTEPSEGSAPGTSTEPSEGSAPGSPAGSPTSTEEGTSTEPSEGSAPGTSTEPSEGSAPGTSESATPESGPGTSTEPSEGSAPGTSESATPESGPGSEPATSGSETPGTSTEPSEGSAPGTSTEPSEGSAPGTSESATPESGPGTSESATPESG

SEQ ID NO: 624 - protein, 320 aa, Artificial Sequence
  Description of Artificial Sequence: Synthetic polypeptide
WGQGTLVTVSGAPCGASPLGLAGSLSGRSDNHPGSPAGSPTSTEEGTSESATPESGPGTSTEPSEGSAPGSPAGSPTSTEEGTSTEPSEGSAPGTSTEPSEGSAPGTSESATPESGPGSEPATSGSETPGSEPATSGSETPGSPAGSPTSTEEGTSESATPESGPGTSTEPSEGSAPGTSTEPSEGSAPGSPAGSPTSTEEGTSTEPSEGSAPGTSTEPSEGSAPGTSESATPESGPGTSTEPSEGSAPGTSESATPESGPGSEPATSGSETPGTSTEPSEGSAPGTSTEPSEGSAPGTSESATPESGPGTSESATPESG

SEQ ID NO: 625 - protein, 356 aa, Artificial Sequence
  Description of Artificial Sequence: Synthetic polypeptide
WGQGTLVTVSGSPGAGSCAGSPTSTEEGTSESACSPEGPGTSTEPSEGSCGGSPLGLAGSLSGRSDNHPGSPAGSPTSTEEGTSESATPESGPGTSTEPSEGSAPGSPAGSPTSTEEGTSTEPSEGSAPGTSTEPSEGSAPGTSESATPESGPGSEPATSGSETPGSEPATSGSETPGSPAGSPTSTEEGTSESATPESGPGTSTEPSEGSAPGTSTEPSEGSAPGSPAGSPTSTEEGTSTEPSEGSAPGTSTEPSEGSAPGTSESATPESGPGTSTEPSEGSAPGTSESATPESGPGSEPATSGSETPGTSTEPSEGSAPGTSTEPSEGSAPGTSESATPESGPGTSESATPESG

SEQ ID NO: 626 - protein, 328 aa, Artificial Sequence
  Description of Artificial Sequence: Synthetic polypeptide
WGQGTLVTVSGAPCGAGCAGPCGPSPLGLAGSLSGRSDNHPGSPAGSPTSTEEGTSESATPESGPGTSTEPSEGSAPGSPAGSPTSTEEGTSTEPSEGSAPGTSTEPSEGSAPGTSESATPESGPGSEPATSGSETPGSEPATSGSETPGSPAGSPTSTEEGTSESATPESGPGTSTEPSEGSAPGTSTEPSEGSAPGSPAGSPTSTEEGTSTEPSEGSAPGTSTEPSEGSAPGTSESATPESGPGTSTEPSEGSAPGTSESATPESGPGSEPATSGSETPGTSTEPSEGSAPGTSTEPSEGSAPGTSESATPESGPGTSESATPESG

SEQ ID NO: 627 - protein, 458 aa, Artificial Sequence
  Description of Artificial Sequence: Synthetic polypeptide
WGQGTLVTVSGSPGAGSCAGSPTSTEEGTSESACSPEGPGTSTEPSEGSCGPSPAGSPTSTEEGTCTEPSEGSAPGTSEPTCSGSAPGTSESATPESCGPSEPATSGSETPGSCAPTSGSETPGSPAGSCTSTEEGTSESATPESCGPTESASGSPLGLAGSLSGRSDNHPGSPAGSPTSTEEGTSESATPESGPGTSTEPSEGSAPGSPAGSPTSTEEGTSTEPSEGSAPGTSTEPSEGSAPGTSESATPESGPGSEPATSGSETPGSEPATSGSETPGSPAGSPTSTEEGTSESATPESGPGTSTEPSEGSAPGTSTEPSEGSAPGSPAGSPTSTEEGTSTEPSEGSAPGTSTEPSEGSAPGTSESATPESGPGTSTEPSEGSAPGTSESATPESGPGSEPATSGSETPGTSTEPSEGSAPGTSTEPSEGSAPGTSESATPESGPGTSESATPESG

SEQ ID NO: 628 - protein, 394 aa, Artificial Sequence
  Description of Artificial Sequence: Synthetic polypeptide
WGQGTLVTVSGSPGAGSCTETSPSTCPTESPEACGSGSGSPCSPSGTEACSTSGSEGCSPSSTAPCGPTETEGCTTSSGPPCPESATSEGSPLGLAGSLSGRSDNHPGSPAGSPTSTEEGTSESATPESGPGTSTEPSEGSAPGSPAGSPTSTEEGTSTEPSEGSAPGTSTEPSEGSAPGTSESATPESGPGSEPATSGSETPGSEPATSGSETPGSPAGSPTSTEEGTSESATPESGPGTSTEPSEGSAPGTSTEPSEGSAPGSPAGSPTSTEEGTSTEPSEGSAPGTSTEPSEGSAPGTSESATPESGPGTSTEPSEGSAPGTSESATPESGPGSEPATSGSETPGTSTEPSEGSAPGTSTEPSEGSAPGTSESATPESGPGTSESATPESG

SEQ ID NO: 629 - protein, 320 aa, Artificial Sequence
  Description of Artificial Sequence: Synthetic polypeptide
WGQGTLVTVSGSPGAGSCAGSPLGLSGRSDNHPGSPAGSPTSTEEGTSESATPESGPGTSTEPSEGSAPGSPAGSPTSTEEGTSTEPSEGSAPGTSTEPSEGSAPGTSESATPESGPGSEPATSGSETPGSEPATSGSETPGSPAGSPTSTEEGTSESATPESGPGTSTEPSEGSAPGTSTEPSEGSAPGSPAGSPTSTEEGTSTEPSEGSAPGTSTEPSEGSAPGTSESATPESGPGTSTEPSEGSAPGTSESATPESGPGSEPATSGSETPGTSTEPSEGSAPGTSTEPSEGSAPGTSESATPESGPGTSESATPESG

SEQ ID NO: 630 - protein, 316 aa, Artificial Sequence
  Description of Artificial Sequence: Synthetic polypeptide
WGQGTLVTVSGAPCGASPLGLSGRSDNHPGSPAGSPTSTEEGTSESATPESGPGTSTEPSEGSAPGSPAGSPTSTEEGTSTEPSEGSAPGTSTEPSEGSAPGTSESATPESGPGSEPATSGSETPGSEPATSGSETPGSPAGSPTSTEEGTSESATPESGPGTSTEPSEGSAPGTSTEPSEGSAPGSPAGSPTSTEEGTSTEPSEGSAPGTSTEPSEGSAPGTSESATPESGPGTSTEPSEGSAPGTSESATPESGPGSEPATSGSETPGTSTEPSEGSAPGTSTEPSEGSAPGTSESATPESGPGTSESATPESG

SEQ ID NO: 631 - protein, 352 aa, Artificial Sequence
  Description of Artificial Sequence: Synthetic polypeptide
WGQGTLVTVSGSPGAGSCAGSPTSTEEGTSESACSPEGPGTSTEPSEGSCGGSPLGLSGRSDNHPGSPAGSPTSTEEGTSESATPESGPGTSTEPSEGSAPGSPAGSPTSTEEGTSTEPSEGSAPGTSTEPSEGSAPGTSESATPESGPGSEPATSGSETPGSEPATSGSETPGSPAGSPTSTEEGTSESATPESGPGTSTEPSEGSAPGTSTEPSEGSAPGSPAGSPTSTEEGTSTEPSEGSAPGTSTEPSEGSAPGTSESATPESGPGTSTEPSEGSAPGTSESATPESGPGSEPATSGSETPGTSTEPSEGSAPGTSTEPSEGSAPGTSESATPESGPGTSESATPESG

SEQ ID NO: 632 - protein, 324 aa, Artificial Sequence
  Description of Artificial Sequence: Synthetic polypeptide
WGQGTLVTVSGAPCGAGCAGPCGPSPLGLSGRSDNHPGSPAGSPTSTEEGTSESATPESGPGTSTEPSEGSAPGSPAGSPTSTEEGTSTEPSEGSAPGTSTEPSEGSAPGTSESATPESGPGSEPATSGSETPGSEPATSGSETPGSPAGSPTSTEEGTSESATPESGPGTSTEPSEGSAPGTSTEPSEGSAPGSPAGSPTSTEEGTSTEPSEGSAPGTSTEPSEGSAPGTSESATPESGPGTSTEPSEGSAPGTSESATPESGPGSEPATSGSETPGTSTEPSEGSAPGTSTEPSEGSAPGTSESATPESGPGTSESATPESG

SEQ ID NO: 633 - protein, 454 aa, Artificial Sequence
  Description of Artificial Sequence: Synthetic polypeptide
WGQGTLVTVSGSPGAGSCAGSPTSTEEGTSESACSPEGPGTSTEPSEGSCGPSPAGSPTSTEEGTCTEPSEGSAPGTSEPTCSGSAPGTSESATPESCGPSEPATSGSETPGSCAPTSGSETPGSPAGSCTSTEEGTSESATPESCGPTESASGSPLGLSGRSDNHPGSPAGSPTSTEEGTSESATPESGPGTSTEPSEGSAPGSPAGSPTSTEEGTSTEPSEGSAPGTSTEPSEGSAPGTSESATPESGPGSEPATSGSETPGSEPATSGSETPGSPAGSPTSTEEGTSESATPESGPGTSTEPSEGSAPGTSTEPSEGSAPGSPAGSPTSTEEGTSTEPSEGSAPGTSTEPSEGSAPGTSESATPESGPGTSTEPSEGSAPGTSESATPESGPGSEPATSGSETPGTSTEPSEGSAPGTSTEPSEGSAPGTSESATPESGPGTSESATPESG

SEQ ID NO: 634 - protein, 390 aa, Artificial Sequence
  Description of Artificial Sequence: Synthetic polypeptide
WGQGTLVTVSGSPGAGSCTETSPSTCPTESPEACGSGSGSPCSPSGTEACSTSGSEGCSPSSTAPCGPTETEGCTTSSGPPCPESATSEGSPLGLSGRSDNHPGSPAGSPTSTEEGTSESATPESGPGTSTEPSEGSAPGSPAGSPTSTEEGTSTEPSEGSAPGTSTEPSEGSAPGTSESATPESGPGSEPATSGSETPGSEPATSGSETPGSPAGSPTSTEEGTSESATPESGPGTSTEPSEGSAPGTSTEPSEGSAPGSPAGSPTSTEEGTSTEPSEGSAPGTSTEPSEGSAPGTSESATPESGPGTSTEPSEGSAPGTSESATPESGPGSEPATSGSETPGTSTEPSEGSAPGTSTEPSEGSAPGTSESATPESGPGTSESATPESG

SEQ ID NO: 635 - protein, 324 aa, Artificial Sequence
  Description of Artificial Sequence: Synthetic polypeptide
WGQGTLVTVSGSPGAGSCAGLAGRSDNHVPLSLSMGPGSPAGSPTSTEEGTSESATPESGPGTSTEPSEGSAPGSPAGSPTSTEEGTSTEPSEGSAPGTSTEPSEGSAPGTSESATPESGPGSEPATSGSETPGSEPATSGSETPGSPAGSPTSTEEGTSESATPESGPGTSTEPSEGSAPGTSTEPSEGSAPGSPAGSPTSTEEGTSTEPSEGSAPGTSTEPSEGSAPGTSESATPESGPGTSTEPSEGSAPGTSESATPESGPGSEPATSGSETPGTSTEPSEGSAPGTSTEPSEGSAPGTSESATPESGPGTSESATPESG

SEQ ID NO: 636 - protein, 320 aa, Artificial Sequence
  Description of Artificial Sequence: Synthetic polypeptide
WGQGTLVTVSGAPCGALAGRSDNHVPLSLSMGPGSPAGSPTSTEEGTSESATPESGPGTSTEPSEGSAPGSPAGSPTSTEEGTSTEPSEGSAPGTSTEPSEGSAPGTSESATPESGPGSEPATSGSETPGSEPATSGSETPGSPAGSPTSTEEGTSESATPESGPGTSTEPSEGSAPGTSTEPSEGSAPGSPAGSPTSTEEGTSTEPSEGSAPGTSTEPSEGSAPGTSESATPESGPGTSTEPSEGSAPGTSESATPESGPGSEPATSGSETPGTSTEPSEGSAPGTSTEPSEGSAPGTSESATPESGPGTSESATPESG

SEQ ID NO: 637 - protein, 356 aa, Artificial Sequence
  Description of Artificial Sequence: Synthetic polypeptide
WGQGTLVTVSGSPGAGSCAGSPTSTEEGTSESACSPEGPGTSTEPSEGSCGGLAGRSDNHVPLSLSMGPGSPAGSPTSTEEGTSESATPESGPGTSTEPSEGSAPGSPAGSPTSTEEGTSTEPSEGSAPGTSTEPSEGSAPGTSESATPESGPGSEPATSGSETPGSEPATSGSETPGSPAGSPTSTEEGTSESATPESGPGTSTEPSEGSAPGTSTEPSEGSAPGSPAGSPTSTEEGTSTEPSEGSAPGTSTEPSEGSAPGTSESATPESGPGTSTEPSEGSAPGTSESATPESGPGSEPATSGSETPGTSTEPSEGSAPGTSTEPSEGSAPGTSESATPESGPGTSESATPESG

SEQ ID NO: 638 - protein, 328 aa, Artificial Sequence
  Description of Artificial Sequence: Synthetic polypeptide
WGQGTLVTVSGAPCGAGCAGPCGPLAGRSDNHVPLSLSMGPGSPAGSPTSTEEGTSESATPESGPGTSTEPSEGSAPGSPAGSPTSTEEGTSTEPSEGSAPGTSTEPSEGSAPGTSESATPESGPGSEPATSGSETPGSEPATSGSETPGSPAGSPTSTEEGTSESATPESGPGTSTEPSEGSAPGTSTEPSEGSAPGSPAGSPTSTEEGTSTEPSEGSAPGTSTEPSEGSAPGTSESATPESGPGTSTEPSEGSAPGTSESATPESGPGSEPATSGSETPGTSTEPSEGSAPGTSTEPSEGSAPGTSESATPESGPGTSESATPESG

SEQ ID NO: 639 - protein, 458 aa, Artificial Sequence
  Description of Artificial Sequence: Synthetic polypeptide
WGQGTLVTVSGSPGAGSCAGSPTSTEEGTSESACSPEGPGTSTEPSEGSCGPSPAGSPTSTEEGTCTEPSEGSAPGTSEPTCSGSAPGTSESATPESCGPSEPATSGSETPGSCAPTSGSETPGSPAGSCTSTEEGTSESATPESCGPTESASGLAGRSDNHVPLSLSMGPGSPAGSPTSTEEGTSESATPESGPGTSTEPSEGSAPGSPAGSPTSTEEGTSTEPSEGSAPGTSTEPSEGSAPGTSESATPESGPGSEPATSGSETPGSEPATSGSETPGSPAGSPTSTEEGTSESATPESGPGTSTEPSEGSAPGTSTEPSEGSAPGSPAGSPTSTEEGTSTEPSEGSAPGTSTEPSEGSAPGTSESATPESGPGTSTEPSEGSAPGTSESATPESGPGSEPATSGSETPGTSTEPSEGSAPGTSTEPSEGSAPGTSESATPESGPGTSESATPESG

SEQ ID NO: 640 - protein, 394 aa, Artificial Sequence
  Description of Artificial Sequence: Synthetic polypeptide
WGQGTLVTVSGSPGAGSCTETSPSTCPTESPEACGSGSGSPCSPSGTEACSTSGSEGCSPSSTAPCGPTETEGCTTSSGPPCPESATSEGLAGRSDNHVPLSLSMGPGSPAGSPTSTEEGTSESATPESGPGTSTEPSEGSAPGSPAGSPTSTEEGTSTEPSEGSAPGTSTEPSEGSAPGTSESATPESGPGSEPATSGSETPGSEPATSGSETPGSPAGSPTSTEEGTSESATPESGPGTSTEPSEGSAPGTSTEPSEGSAPGSPAGSPTSTEEGTSTEPSEGSAPGTSTEPSEGSAPGTSESATPESGPGTSTEPSEGSAPGTSESATPESGPGSEPATSGSETPGTSTEPSEGSAPGTSTEPSEGSAPGTSESATPESGPGTSESATPESG

SEQ ID NO: 641 - protein, 325 aa, Artificial Sequence
  Description of Artificial Sequence: Synthetic polypeptide
TFGQGTKVEIKGSPGAGSCAGLSGRSDNHSPLGLAGSPGSPAGSPTSTEEGTSESATPESGPGTSTEPSEGSAPGSPAGSPTSTEEGTSTEPSEGSAPGTSTEPSEGSAPGTSESATPESGPGSEPATSGSETPGSEPATSGSETPGSPAGSPTSTEEGTSESATPESGPGTSTEPSEGSAPGTSTEPSEGSAPGSPAGSPTSTEEGTSTEPSEGSAPGTSTEPSEGSAPGTSESATPESGPGTSTEPSEGSAPGTSESATPESGPGSEPATSGSETPGTSTEPSEGSAPGTSTEPSEGSAPGTSESATPESGPGTSESATPESG

SEQ ID NO: 642 - protein, 321 aa, Artificial Sequence
  Description of Artificial Sequence: Synthetic polypeptide
TFGQGTKVEIKGAPCGALSGRSDNHSPLGLAGSPGSPAGSPTSTEEGTSESATPESGPGTSTEPSEGSAPGSPAGSPTSTEEGTSTEPSEGSAPGTSTEPSEGSAPGTSESATPESGPGSEPATSGSETPGSEPATSGSETPGSPAGSPTSTEEGTSESATPESGPGTSTEPSEGSAPGTSTEPSEGSAPGSPAGSPTSTEEGTSTEPSEGSAPGTSTEPSEGSAPGTSESATPESGPGTSTEPSEGSAPGTSESATPESGPGSEPATSGSETPGTSTEPSEGSAPGTSTEPSEGSAPGTSESATPESGPGTSESATPESG

SEQ ID NO: 643 - protein, 357 aa, Artificial Sequence
  Description of Artificial Sequence: Synthetic polypeptide
TFGQGTKVEIKGSPGAGSCAGSPTSTEEGTSESACSPEGPGTSTEPSEGSCGGLSGRSDNHSPLGLAGSPGSPAGSPTSTEEGTSESATPESGPGTSTEPSEGSAPGSPAGSPTSTEEGTSTEPSEGSAPGTSTEPSEGSAPGTSESATPESGPGSEPATSGSETPGSEPATSGSETPGSPAGSPTSTEEGTSESATPESGPGTSTEPSEGSAPGTSTEPSEGSAPGSPAGSPTSTEEGTSTEPSEGSAPGTSTEPSEGSAPGTSESATPESGPGTSTEPSEGSAPGTSESATPESGPGSEPATSGSETPGTSTEPSEGSAPGTSTEPSEGSAPGTSESATPESGPGTSESATPESG

SEQ ID NO: 644 - protein, 329 aa, Artificial Sequence
  Description of Artificial Sequence: Synthetic polypeptide
TFGQGTKVEIKGAPCGAGCAGPCGPLSGRSDNHSPLGLAGSPGSPAGSPTSTEEGTSESATPESGPGTSTEPSEGSAPGSPAGSPTSTEEGTSTEPSEGSAPGTSTEPSEGSAPGTSESATPESGPGSEPATSGSETPGSEPATSGSETPGSPAGSPTSTEEGTSESATPESGPGTSTEPSEGSAPGTSTEPSEGSAPGSPAGSPTSTEEGTSTEPSEGSAPGTSTEPSEGSAPGTSESATPESGPGTSTEPSEGSAPGTSESATPESGPGSEPATSGSETPGTSTEPSEGSAPGTSTEPSEGSAPGTSESATPESGPGTSESATPESG

SEQ ID NO: 645 - protein, 459 aa, Artificial Sequence
  Description of Artificial Sequence: Synthetic polypeptide
TFGQGTKVEIKGSPGAGSCAGSPTSTEEGTSESACSPEGPGTSTEPSEGSCGPSPAGSPTSTEEGTCTEPSEGSAPGTSEPTCSGSAPGTSESATPESCGPSEPATSGSETPGSCAPTSGSETPGSPAGSCTSTEEGTSESATPESCGPTESASGLSGRSDNHSPLGLAGSPGSPAGSPTSTEEGTSESATPESGPGTSTEPSEGSAPGSPAGSPTSTEEGTSTEPSEGSAPGTSTEPSEGSAPGTSESATPESGPGSEPATSGSETPGSEPATSGSETPGSPAGSPTSTEEGTSESATPESGPGTSTEPSEGSAPGTSTEPSEGSAPGSPAGSPTSTEEGTSTEPSEGSAPGTSTEPSEGSAPGTSESATPESGPGTSTEPSEGSAPGTSESATPESGPGSEPATSGSETPGTSTEPSEGSAPGTSTEPSEGSAPGTSESATPESGPGTSESATPESG

SEQ ID NO: 646 - protein, 395 aa, Artificial Sequence
  Description of Artificial Sequence: Synthetic polypeptide
TFGQGTKVEIKGSPGAGSCTETSPSTCPTESPEACGSGSGSPCSPSGTEACSTSGSEGCSPSSTAPCGPTETEGCTTSSGPPCPESATSEGLSGRSDNHSPLGLAGSPGSPAGSPTSTEEGTSESATPESGPGTSTEPSEGSAPGSPAGSPTSTEEGTSTEPSEGSAPGTSTEPSEGSAPGTSESATPESGPGSEPATSGSETPGSEPATSGSETPGSPAGSPTSTEEGTSESATPESGPGTSTEPSEGSAPGTSTEPSEGSAPGSPAGSPTSTEEGTSTEPSEGSAPGTSTEPSEGSAPGTSESATPESGPGTSTEPSEGSAPGTSESATPESGPGSEPATSGSETPGTSTEPSEGSAPGTSTEPSEGSAPGTSESATPESGPGTSESATPESG

SEQ ID NO: 647 - protein, 325 aa, Artificial Sequence
  Description of Artificial Sequence: Synthetic polypeptide
TFGQGTKVEIKGSPGAGSCAGSPLGLAGSLSGRSDNHPGSPAGSPTSTEEGTSESATPESGPGTSTEPSEGSAPGSPAGSPTSTEEGTSTEPSEGSAPGTSTEPSEGSAPGTSESATPESGPGSEPATSGSETPGSEPATSGSETPGSPAGSPTSTEEGTSESATPESGPGTSTEPSEGSAPGTSTEPSEGSAPGSPAGSPTSTEEGTSTEPSEGSAPGTSTEPSEGSAPGTSESATPESGPGTSTEPSEGSAPGTSESATPESGPGSEPATSGSETPGTSTEPSEGSAPGTSTEPSEGSAPGTSESATPESGPGTSESATPESG

SEQ ID NO: 648 - protein, 321 aa, Artificial Sequence
  Description of Artificial Sequence: Synthetic polypeptide
TFGQGTKVEIKGAPCGASPLGLAGSLSGRSDNHPGSPAGSPTSTEEGTSESATPESGPGTSTEPSEGSAPGSPAGSPTSTEEGTSTEPSEGSAPGTSTEPSEGSAPGTSESATPESGPGSEPATSGSETPGSEPATSGSETPGSPAGSPTSTEEGTSESATPESGPGTSTEPSEGSAPGTSTEPSEGSAPGSPAGSPTSTEEGTSTEPSEGSAPGTSTEPSEGSAPGTSESATPESGPGTSTEPSEGSAPGTSESATPESGPGSEPATSGSETPGTSTEPSEGSAPGTSTEPSEGSAPGTSESATPESGPGTSESATPESG

SEQ ID NO: 649 - protein, 357 aa, Artificial Sequence
  Description of Artificial Sequence: Synthetic polypeptide
TFGQGTKVEIKGSPGAGSCAGSPTSTEEGTSESACSPEGPGTSTEPSEGSCGGSPLGLAGSLSGRSDNHPGSPAGSPTSTEEGTSESATPESGPGTSTEPSEGSAPGSPAGSPTSTEEGTSTEPSEGSAPGTSTEPSEGSAPGTSESATPESGPGSEPATSGSETPGSEPATSGSETPGSPAGSPTSTEEGTSESATPESGPGTSTEPSEGSAPGTSTEPSEGSAPGSPAGSPTSTEEGTSTEPSEGSAPGTSTEPSEGSAPGTSESATPESGPGTSTEPSEGSAPGTSESATPESGPGSEPATSGSETPGTSTEPSEGSAPGTSTEPSEGSAPGTSESATPESGPGTSESATPESG

SEQ ID NO: 650 - protein, 329 aa, Artificial Sequence
  Description of Artificial Sequence: Synthetic polypeptide
TFGQGTKVEIKGAPCGAGCAGPCGPSPLGLAGSLSGRSDNHPGSPAGSPTSTEEGTSESATPESGPGTSTEPSEGSAPGSPAGSPTSTEEGTSTEPSEGSAPGTSTEPSEGSAPGTSESATPESGPGSEPATSGSETPGSEPATSGSETPGSPAGSPTSTEEGTSESATPESGPGTSTEPSEGSAPGTSTEPSEGSAPGSPAGSPTSTEEGTSTEPSEGSAPGTSTEPSEGSAPGTSESATPESGPGTSTEPSEGSAPGTSESATPESGPGSEPATSGSETPGTSTEPSEGSAPGTSTEPSEGSAPGTSESATPESGPGTSESATPESG

SEQ ID NO: 651 - protein, 459 aa, Artificial Sequence
  Description of Artificial Sequence: Synthetic polypeptide
TFGQGTKVEIKGSPGAGSCAGSPTSTEEGTSESACSPEGPGTSTEPSEGSCGPSPAGSPTSTEEGTCTEPSEGSAPGTSEPTCSGSAPGTSESATPESCGPSEPATSGSETPGSCAPTSGSETPGSPAGSCTSTEEGTSESATPESCGPTESASGSPLGLAGSLSGRSDNHPGSPAGSPTSTEEGTSESATPESGPGTSTEPSEGSAPGSPAGSPTSTEEGTSTEPSEGSAPGTSTEPSEGSAPGTSESATPESGPGSEPATSGSETPGSEPATSGSETPGSPAGSPTSTEEGTSESATPESGPGTSTEPSEGSAPGTSTEPSEGSAPGSPAGSPTSTEEGTSTEPSEGSAPGTSTEPSEGSAPGTSESATPESGPGTSTEPSEGSAPGTSESATPESGPGSEPATSGSETPGTSTEPSEGSAPGTSTEPSEGSAPGTSESATPESGPGTSESATPESG

SEQ ID NO: 652 - protein, 395 aa, Artificial Sequence
  Description of Artificial Sequence: Synthetic polypeptide
TFGQGTKVEIKGSPGAGSCTETSPSTCPTESPEACGSGSGSPCSPSGTEACSTSGSEGCSPSSTAPCGPTETEGCTTSSGPPCPESATSEGSPLGLAGSLSGRSDNHPGSPAGSPTSTEEGTSESATPESGPGTSTEPSEGSAPGSPAGSPTSTEEGTSTEPSEGSAPGTSTEPSEGSAPGTSESATPESGPGSEPATSGSETPGSEPATSGSETPGSPAGSPTSTEEGTSESATPESGPGTSTEPSEGSAPGTSTEPSEGSAPGSPAGSPTSTEEGTSTEPSEGSAPGTSTEPSEGSAPGTSESATPESGPGTSTEPSEGSAPGTSESATPESGPGSEPATSGSETPGTSTEPSEGSAPGTSTEPSEGSAPGTSESATPESGPGTSESATPESG

SEQ ID NO: 653 - protein, 321 aa, Artificial Sequence
  Description of Artificial Sequence: Synthetic polypeptide
TFGQGTKVEIKGSPGAGSCAGSPLGLSGRSDNHPGSPAGSPTSTEEGTSESATPESGPGTSTEPSEGSAPGSPAGSPTSTEEGTSTEPSEGSAPGTSTEPSEGSAPGTSESATPESGPGSEPATSGSETPGSEPATSGSETPGSPAGSPTSTEEGTSESATPESGPGTSTEPSEGSAPGTSTEPSEGSAPGSPAGSPTSTEEGTSTEPSEGSAPGTSTEPSEGSAPGTSESATPESGPGTSTEPSEGSAPGTSESATPESGPGSEPATSGSETPGTSTEPSEGSAPGTSTEPSEGSAPGTSESATPESGPGTSESATPESG

SEQ ID NO: 654 - protein, 317 aa, Artificial Sequence
  Description of Artificial Sequence: Synthetic polypeptide
TFGQGTKVEIKGAPCGASPLGLSGRSDNHPGSPAGSPTSTEEGTSESATPESGPGTSTEPSEGSAPGSPAGSPTSTEEGTSTEPSEGSAPGTSTEPSEGSAPGTSESATPESGPGSEPATSGSETPGSEPATSGSETPGSPAGSPTSTEEGTSESATPESGPGTSTEPSEGSAPGTSTEPSEGSAPGSPAGSPTSTEEGTSTEPSEGSAPGTSTEPSEGSAPGTSESATPESGPGTSTEPSEGSAPGTSESATPESGPGSEPATSGSETPGTSTEPSEGSAPGTSTEPSEGSAPGTSESATPESGPGTSESATPESG

SEQ ID NO: 655 - protein, 353 aa, Artificial Sequence
  Description of Artificial Sequence: Synthetic polypeptide
TFGQGTKVEIKGSPGAGSCAGSPTSTEEGTSESACSPEGPGTSTEPSEGSCGGSPLGLSGRSDNHPGSPAGSPTSTEEGTSESATPESGPGTSTEPSEGSAPGSPAGSPTSTEEGTSTEPSEGSAPGTSTEPSEGSAPGTSESATPESGPGSEPATSGSETPGSEPATSGSETPGSPAGSPTSTEEGTSESATPESGPGTSTEPSEGSAPGTSTEPSEGSAPGSPAGSPTSTEEGTSTEPSEGSAPGTSTEPSEGSAPGTSESATPESGPGTSTEPSEGSAPGTSESATPESGPGSEPATSGSETPGTSTEPSEGSAPGTSTEPSEGSAPGTSESATPESGPGTSESATPESG

SEQ ID NO: 656 - protein, 325 aa, Artificial Sequence
  Description of Artificial Sequence: Synthetic polypeptide
TFGQGTKVEIKGAPCGAGCAGPCGPSPLGLSGRSDNHPGSPAGSPTSTEEGTSESATPESGPGTSTEPSEGSAPGSPAGSPTSTEEGTSTEPSEGSAPGTSTEPSEGSAPGTSESATPESGPGSEPATSGSETPGSEPATSGSETPGSPAGSPTSTEEGTSESATPESGPGTSTEPSEGSAPGTSTEPSEGSAPGSPAGSPTSTEEGTSTEPSEGSAPGTSTEPSEGSAPGTSESATPESGPGTSTEPSEGSAPGTSESATPESGPGSEPATSGSETPGTSTEPSEGSAPGTSTEPSEGSAPGTSESATPESGPGTSESATPESG

SEQ ID NO: 657 - protein, 455 aa, Artificial Sequence
  Description of Artificial Sequence: Synthetic polypeptide
TFGQGTKVEIKGSPGAGSCAGSPTSTEEGTSESACSPEGPGTSTEPSEGSCGPSPAGSPTSTEEGTCTEPSEGSAPGTSEPTCSGSAPGTSESATPESCGPSEPATSGSETPGSCAPTSGSETPGSPAGSCTSTEEGTSESATPESCGPTESASGSPLGLSGRSDNHPGSPAGSPTSTEEGTSESATPESGPGTSTEPSEGSAPGSPAGSPTSTEEGTSTEPSEGSAPGTSTEPSEGSAPGTSESATPESGPGSEPATSGSETPGSEPATSGSETPGSPAGSPTSTEEGTSESATPESGPGTSTEPSEGSAPGTSTEPSEGSAPGSPAGSPTSTEEGTSTEPSEGSAPGTSTEPSEGSAPGTSESATPESGPGTSTEPSEGSAPGTSESATPESGPGSEPATSGSETPGTSTEPSEGSAPGTSTEPSEGSAPGTSESATPESGPGTSESATPESG

SEQ ID NO: 658 - protein, 391 aa, Artificial Sequence
  Description of Artificial Sequence: Synthetic polypeptide
TFGQGTKVEIKGSPGAGSCTETSPSTCPTESPEACGSGSGSPCSPSGTEACSTSGSEGCSPSSTAPCGPTETEGCTTSSGPPCPESATSEGSPLGLSGRSDNHPGSPAGSPTSTEEGTSESATPESGPGTSTEPSEGSAPGSPAGSPTSTEEGTSTEPSEGSAPGTSTEPSEGSAPGTSESATPESGPGSEPATSGSETPGSEPATSGSETPGSPAGSPTSTEEGTSESATPESGPGTSTEPSEGSAPGTSTEPSEGSAPGSPAGSPTSTEEGTSTEPSEGSAPGTSTEPSEGSAPGTSESATPESGPGTSTEPSEGSAPGTSESATPESGPGSEPATSGSETPGTSTEPSEGSAPGTSTEPSEGSAPGTSESATPESGPGTSESATPESG

SEQ ID NO: 659 - protein, 325 aa, Artificial Sequence
  Description of Artificial Sequence: Synthetic polypeptide
TFGQGTKVEIKGSPGAGSCAGLAGRSDNHVPLSLSMGPGSPAGSPTSTEEGTSESATPESGPGTSTEPSEGSAPGSPAGSPTSTEEGTSTEPSEGSAPGTSTEPSEGSAPGTSESATPESGPGSEPATSGSETPGSEPATSGSETPGSPAGSPTSTEEGTSESATPESGPGTSTEPSEGSAPGTSTEPSEGSAPGSPAGSPTSTEEGTSTEPSEGSAPGTSTEPSEGSAPGTSESATPESGPGTSTEPSEGSAPGTSESATPESGPGSEPATSGSETPGTSTEPSEGSAPGTSTEPSEGSAPGTSESATPESGPGTSESATPESG

SEQ ID NO: 660 - protein, 321 aa, Artificial Sequence
  Description of Artificial Sequence: Synthetic polypeptide
TFGQGTKVEIKGAPCGALAGRSDNHVPLSLSMGPGSPAGSPTSTEEGTSESATPESGPGTSTEPSEGSAPGSPAGSPTSTEEGTSTEPSEGSAPGTSTEPSEGSAPGTSESATPESGPGSEPATSGSETPGSEPATSGSETPGSPAGSPTSTEEGTSESATPESGPGTSTEPSEGSAPGTSTEPSEGSAPGSPAGSPTSTEEGTSTEPSEGSAPGTSTEPSEGSAPGTSESATPESGPGTSTEPSEGSAPGTSESATPESGPGSEPATSGSETPGTSTEPSEGSAPGTSTEPSEGSAPGTSESATPESGPGTSESATPESG

SEQ ID NO: 661 - protein, 357 aa, Artificial Sequence
  Description of Artificial Sequence: Synthetic polypeptide
TFGQGTKVEIKGSPGAGSCAGSPTSTEEGTSESACSPEGPGTSTEPSEGSCGGLAGRSDNHVPLSLSMGPGSPAGSPTSTEEGTSESATPESGPGTSTEPSEGSAPGSPAGSPTSTEEGTSTEPSEGSAPGTSTEPSEGSAPGTSESATPESGPGSEPATSGSETPGSEPATSGSETPGSPAGSPTSTEEGTSESATPESGPGTSTEPSEGSAPGTSTEPSEGSAPGSPAGSPTSTEEGTSTEPSEGSAPGTSTEPSEGSAPGTSESATPESGPGTSTEPSEGSAPGTSESATPESGPGSEPATSGSETPGTSTEPSEGSAPGTSTEPSEGSAPGTSESATPESGPGTSESATPESG

SEQ ID NO: 662 - protein, 329 aa, Artificial Sequence
  Description of Artificial Sequence: Synthetic polypeptide
TFGQGTKVEIKGAPCGAGCAGPCGPLAGRSDNHVPLSLSMGPGSPAGSPTSTEEGTSESATPESGPGTSTEPSEGSAPGSPAGSPTSTEEGTSTEPSEGSAPGTSTEPSEGSAPGTSESATPESGPGSEPATSGSETPGSEPATSGSETPGSPAGSPTSTEEGTSESATPESGPGTSTEPSEGSAPGTSTEPSEGSAPGSPAGSPTSTEEGTSTEPSEGSAPGTSTEPSEGSAPGTSESATPESGPGTSTEPSEGSAPGTSESATPESGPGSEPATSGSETPGTSTEPSEGSAPGTSTEPSEGSAPGTSESATPESGPGTSESATPESG

SEQ ID NO: 663 - protein, 459 aa, Artificial Sequence
  Description of Artificial Sequence: Synthetic polypeptide
TFGQGTKVEIKGSPGAGSCAGSPTSTEEGTSESACSPEGPGTSTEPSEGSCGPSPAGSPTSTEEGTCTEPSEGSAPGTSEPTCSGSAPGTSESATPESCGPSEPATSGSETPGSCAPTSGSETPGSPAGSCTSTEEGTSESATPESCGPTESASGLAGRSDNHVPLSLSMGPGSPAGSPTSTEEGTSESATPESGPGTSTEPSEGSAPGSPAGSPTSTEEGTSTEPSEGSAPGTSTEPSEGSAPGTSESATPESGPGSEPATSGSETPGSEPATSGSETPGSPAGSPTSTEEGTSESATPESGPGTSTEPSEGSAPGTSTEPSEGSAPGSPAGSPTSTEEGTSTEPSEGSAPGTSTEPSEGSAPGTSESATPESGPGTSTEPSEGSAPGTSESATPESGPGSEPATSGSETPGTSTEPSEGSAPGTSTEPSEGSAPGTSESATPESGPGTSESATPESG

SEQ ID NO: 664 - protein, 395 aa, Artificial Sequence
  Description of Artificial Sequence: Synthetic polypeptide
TFGQGTKVEIKGSPGAGSCTETSPSTCPTESPEACGSGSGSPCSPSGTEACSTSGSEGCSPSSTAPCGPTETEGCTTSSGPPCPESATSEGLAGRSDNHVPLSLSMGPGSPAGSPTSTEEGTSESATPESGPGTSTEPSEGSAPGSPAGSPTSTEEGTSTEPSEGSAPGTSTEPSEGSAPGTSESATPESGPGSEPATSGSETPGSEPATSGSETPGSPAGSPTSTEEGTSESATPESGPGTSTEPSEGSAPGTSTEPSEGSAPGSPAGSPTSTEEGTSTEPSEGSAPGTSTEPSEGSAPGTSESATPESGPGTSTEPSEGSAPGTSESATPESGPGSEPATSGSETPGTSTEPSEGSAPGTSTEPSEGSAPGTSESATPESGPGTSESATPESG

SEQ ID NO: 665 - protein, 325 aa, Artificial Sequence
  Description of Artificial Sequence: Synthetic polypeptide
GTSESATPESGPGSEPATSGSETPGTSESATPESGPGSEPATSGSETPGTSESATPESGPGTSTEPSEGSAPGSPAGSPTSTEEGTSESATPESGPGSEPATSGSETPGTSESATPESGPGSPAGSPTSTEEGSPAGSPTSTEEGTSTEPSEGSAPGTSESATPESGPGTSESATPESGPGTSESATPESGPGSEPATSGSETPGSEPATSGSETPGSPAGSPTSTEEGTSTEPSEGSAPGTSTEPSEGSAPGSEPATSGSETPGTSESATPESGPGTSTEPSEGSAPGEVQLVESGGGLSGRSDNHSPLGLAGSGSPGAGSCAG

SEQ ID NO: 666 - protein, 325 aa, Artificial Sequence
  Description of Artificial Sequence: Synthetic polypeptide
GTSESATPESGPGSEPATSGSETPGTSESATPESGPGSEPATSGSETPGTSESATPESGPGTSTEPSEGSAPGSPAGSPTSTEEGTSESATPESGPGSEPATSGSETPGTSESATPESGPGSPAGSPTSTEEGSPAGSPTSTEEGTSTEPSEGSAPGTSESATPESGPGTSESATPESGPGTSESATPESGPGSEPATSGSETPGSEPATSGSETPGSPAGSPTSTEEGTSTEPSEGSAPGTSTEPSEGSAPGSEPATSGSETPGTSESATPESGPGTSTEPSEGSAPGDIQMTQSPSSSPLGLAGSLSGRSDNHGSPGAGSCAG

SEQ ID NO: 667 - protein, 311 aa, Artificial Sequence
  Description of Artificial Sequence: Synthetic polypeptide
GTSESATPESGPGSEPATSGSETPGTSESATPESGPGSEPATSGSETPGTSESATPESGPGTSTEPSEGSAPGSPAGSPTSTEEGTSESATPESGPGSEPATSGSETPGTSESATPESGPGSPAGSPTSTEEGSPAGSPTSTEEGTSTEPSEGSAPGTSESATPESGPGTSESATPESGPGTSESATPESGPGSEPATSGSETPGSEPATSGSETPGSPAGSPTSTEEGTSTEPSEGSAPGTSTEPSEGSAPGSEPATSGSETPGTSESATPESGPGTSTEPSEGSAPGSPLGLSGRSDNHGSPGAGSCAG

SEQ ID NO: 668 - protein, 315 aa, Artificial Sequence
  Description of Artificial Sequence: Synthetic polypeptide
GTSESATPESGPGSEPATSGSETPGTSESATPESGPGSEPATSGSETPGTSESATPESGPGTSTEPSEGSAPGSPAGSPTSTEEGTSESATPESGPGSEPATSGSETPGTSESATPESGPGSPAGSPTSTEEGSPAGSPTSTEEGTSTEPSEGSAPGTSESATPESGPGTSESATPESGPGTSESATPESGPGSEPATSGSETPGSEPATSGSETPGSPAGSPTSTEEGTSTEPSEGSAPGTSTEPSEGSAPGSEPATSGSETPGTSESATPESGPGTSTEPSEGSAPGLAGRSDNHVPLSLSMGGSPGAGSCAG

SEQ ID NO: 669 - protein, 311 aa, Artificial Sequence
  Description of Artificial Sequence: Synthetic polypeptide
GTSESATPESGPGSEPATSGSETPGTSESATPESGPGSEPATSGSETPGTSESATPESGPGTSTEPSEGSAPGSPAGSPTSTEEGTSESATPESGPGSEPATSGSETPGTSESATPESGPGSPAGSPTSTEEGSPAGSPTSTEEGTSTEPSEGSAPGTSESATPESGPGTSESATPESGPGTSESATPESGPGSEPATSGSETPGSEPATSGSETPGSPAGSPTSTEEGTSTEPSEGSAPGTSTEPSEGSAPGSEPATSGSETPGTSESATPESGPGTSTEPSEGSAPGLSGRSDNHSPLGLAGSGAPCGA

SEQ ID NO: 670 - protein, 311 aa, Artificial Sequence
  Description of Artificial Sequence: Synthetic polypeptide
GTSESATPESGPGSEPATSGSETPGTSESATPESGPGSEPATSGSETPGTSESATPESGPGTSTEPSEGSAPGSPAGSPTSTEEGTSESATPESGPGSEPATSGSETPGTSESATPESGPGSPAGSPTSTEEGSPAGSPTSTEEGTSTEPSEGSAPGTSESATPESGPGTSESATPESGPGTSESATPESGPGSEPATSGSETPGSEPATSGSETPGSPAGSPTSTEEGTSTEPSEGSAPGTSTEPSEGSAPGSEPATSGSETPGTSESATPESGPGTSTEPSEGSAPGSPLGLAGSLSGRSDNHGAPCGA

SEQ ID NO: 671 - protein, 307 aa, Artificial Sequence
  Description of Artificial Sequence: Synthetic polypeptide
GTSESATPESGPGSEPATSGSETPGTSESATPESGPGSEPATSGSETPGTSESATPESGPGTSTEPSEGSAPGSPAGSPTSTEEGTSESATPESGPGSEPATSGSETPGTSESATPESGPGSPAGSPTSTEEGSPAGSPTSTEEGTSTEPSEGSAPGTSESATPESGPGTSESATPESGPGTSESATPESGPGSEPATSGSETPGSEPATSGSETPGSPAGSPTSTEEGTSTEPSEGSAPGTSTEPSEGSAPGSEPATSGSETPGTSESATPESGPGTSTEPSEGSAPGSPLGLSGRSDNHGAPCGA

SEQ ID NO: 672 - protein, 311 aa, Artificial Sequence
  Description of Artificial Sequence: Synthetic polypeptide
GTSESATPESGPGSEPATSGSETPGTSESATPESGPGSEPATSGSETPGTSESATPESGPGTSTEPSEGSAPGSPAGSPTSTEEGTSESATPESGPGSEPATSGSETPGTSESATPESGPGSPAGSPTSTEEGSPAGSPTSTEEGTSTEPSEGSAPGTSESATPESGPGTSESATPESGPGTSESATPESGPGSEPATSGSETPGSEPATSGSETPGSPAGSPTSTEEGTSTEPSEGSAPGTSTEPSEGSAPGSEPATSGSETPGTSESATPESGPGTSTEPSEGSAPGLAGRSDNHVPLSLSMGGAPCGA

SEQ ID NO: 673 - protein, 347 aa, Artificial Sequence
  Description of Artificial Sequence: Synthetic polypeptide
GTSESATPESGPGSEPATSGSETPGTSESATPESGPGSEPATSGSETPGTSESATPESGPGTSTEPSEGSAPGSPAGSPTSTEEGTSESATPESGPGSEPATSGSETPGTSESATPESGPGSPAGSPTSTEEGSPAGSPTSTEEGTSTEPSEGSAPGTSESATPESGPGTSESATPESGPGTSESATPESGPGSEPATSGSETPGSEPATSGSETPGSPAGSPTSTEEGTSTEPSEGSAPGTSTEPSEGSAPGSEPATSGSETPGTSESATPESGPGTSTEPSEGSAPGLSGRSDNHSPLGLAGSGSPGAGSCAGSPTSTEEGTSESACSPEGPGTSTEPSEGSCGG

SEQ ID NO: 674 - protein, 347 aa, Artificial Sequence
  Description of Artificial Sequence: Synthetic polypeptide
GTSESATPESGPGSEPATSGSETPGTSESATPESGPGSEPATSGSETPGTSESATPESGPGTSTEPSEGSAPGSPAGSPTSTEEGTSESATPESGPGSEPATSGSETPGTSESATPESGPGSPAGSPTSTEEGSPAGSPTSTEEGTSTEPSEGSAPGTSESATPESGPGTSESATPESGPGTSESATPESGPGSEPATSGSETPGSEPATSGSETPGSPAGSPTSTEEGTSTEPSEGSAPGTSTEPSEGSAPGSEPATSGSETPGTSESATPESGPGTSTEPSEGSAPGSPLGLAGSLSGRSDNHGSPGAGSCAGSPTSTEEGTSESACSPEGPGTSTEPSEGSCGG

SEQ ID NO: 675 - protein, 343 aa, Artificial Sequence
  Description of Artificial Sequence: Synthetic polypeptide
GTSESATPESGPGSEPATSGSETPGTSESATPESGPGSEPATSGSETPGTSESATPESGPGTSTEPSEGSAPGSPAGSPTSTEEGTSESATPESGPGSEPATSGSETPGTSESATPESGPGSPAGSPTSTEEGSPAGSPTSTEEGTSTEPSEGSAPGTSESATPESGPGTSESATPESGPGTSESATPESGPGSEPATSGSETPGSEPATSGSETPGSPAGSPTSTEEGTSTEPSEGSAPGTSTEPSEGSAPGSEPATSGSETPGTSESATPESGPGTSTEPSEGSAPGSPLGLSGRSDNHGSPGAGSCAGSPTSTEEGTSESACSPEGPGTSTEPSEGSCGG

SEQ ID NO: 676 - protein, 347 aa, Artificial Sequence
  Description of Artificial Sequence: Synthetic polypeptide
GTSESATPESGPGSEPATSGSETPGTSESATPESGPGSEPATSGSETPGTSESATPESGPGTSTEPSEGSAPGSPAGSPTSTEEGTSESATPESGPGSEPATSGSETPGTSESATPESGPGSPAGSPTSTEEGSPAGSPTSTEEGTSTEPSEGSAPGTSESATPESGPGTSESATPESGPGTSESATPESGPGSEPATSGSETPGSEPATSGSETPGSPAGSPTSTEEGTSTEPSEGSAPGTSTEPSEGSAPGSEPATSGSETPGTSESATPESGPGTSTEPSEGSAPGLAGRSDNHVPLSLSMGGSPGAGSCAGSPTSTEEGTSESACSPEGPGTSTEPSEGSCGG

SEQ ID NO: 677 - protein, 319 aa, Artificial Sequence
  Description of Artificial Sequence: Synthetic polypeptide
GTSESATPESGPGSEPATSGSETPGTSESATPESGPGSEPATSGSETPGTSESATPESGPGTSTEPSEGSAPGSPAGSPTSTEEGTSESATPESGPGSEPATSGSETPGTSESATPESGPGSPAGSPTSTEEGSPAGSPTSTEEGTSTEPSEGSAPGTSESATPESGPGTSESATPESGPGTSESATPESGPGSEPATSGSETPGSEPATSGSETPGSPAGSPTSTEEGTSTEPSEGSAPGTSTEPSEGSAPGSEPATSGSETPGTSESATPESGPGTSTEPSEGSAPGLSGRSDNHSPLGLAGSGAPCGAGCAGPCGP

SEQ ID NO: 678 - protein, 319 aa, Artificial Sequence
  Description of Artificial Sequence: Synthetic polypeptide
GTSESATPESGPGSEPATSGSETPGTSESATPESGPGSEPATSGSETPGTSESATPESGPGTSTEPSEGSAPGSPAGSPTSTEEGTSESATPESGPGSEPATSGSETPGTSESATPESGPGSPAGSPTSTEEGSPAGSPTSTEEGTSTEPSEGSAPGTSESATPESGPGTSESATPESGPGTSESATPESGPGSEPATSGSETPGSEPATSGSETPGSPAGSPTSTEEGTSTEPSEGSAPGTSTEPSEGSAPGSEPATSGSETPGTSESATPESGPGTSTEPSEGSAPGSPLGLAGSLSGRSDNHGAPCGAGCAGPCGP

SEQ ID NO: 679 - protein, 315 aa, Artificial Sequence
  Description of Artificial Sequence: Synthetic polypeptide
GTSESATPESGPGSEPATSGSETPGTSESATPESGPGSEPATSGSETPGTSESATPESGPGTSTEPSEGSAPGSPAGSPTSTEEGTSESATPESGPGSEPATSGSETPGTSESATPESGPGSPAGSPTSTEEGSPAGSPTSTEEGTSTEPSEGSAPGTSESATPESGPGTSESATPESGPGTSESATPESGPGSEPATSGSETPGSEPATSGSETPGSPAGSPTSTEEGTSTEPSEGSAPGTSTEPSEGSAPGSEPATSGSETPGTSESATPESGPGTSTEPSEGSAPGSPLGLSGRSDNHGAPCGAGCAGPCGP

SEQ ID NO: 680 - protein, 319 aa, Artificial Sequence
  Description of Artificial Sequence: Synthetic polypeptide
GTSESATPESGPGSEPATSGSETPGTSESATPESGPGSEPATSGSETPGTSESATPESGPGTSTEPSEGSAPGSPAGSPTSTEEGTSESATPESGPGSEPATSGSETPGTSESATPESGPGSPAGSPTSTEEGSPAGSPTSTEEGTSTEPSEGSAPGTSESATPESGPGTSESATPESGPGTSESATPESGPGSEPATSGSETPGSEPATSGSETPGSPAGSPTSTEEGTSTEPSEGSAPGTSTEPSEGSAPGSEPATSGSETPGTSESATPESGPGTSTEPSEGSAPGLAGRSDNHVPLSLSMGGAPCGAGCAGPCGP

SEQ ID NO: 681 - protein, 449 aa, Artificial Sequence
  Description of Artificial Sequence: Synthetic polypeptide
GTSESATPESGPGSEPATSGSETPGTSESATPESGPGSEPATSGSETPGTSESATPESGPGTSTEPSEGSAPGSPAGSPTSTEEGTSESATPESGPGSEPATSGSETPGTSESATPESGPGSPAGSPTSTEEGSPAGSPTSTEEGTSTEPSEGSAPGTSESATPESGPGTSESATPESGPGTSESATPESGPGSEPATSGSETPGSEPATSGSETPGSPAGSPTSTEEGTSTEPSEGSAPGTSTEPSEGSAPGSEPATSGSETPGTSESATPESGPGTSTEPSEGSAPGLSGRSDNHSPLGLAGSGSPGAGSCAGSPTSTEEGTSESACSPEGPGTSTEPSEGSCGPSPAGSPTSTEEGTCTEPSEGSAPGTSEPTCSGSAPGTSESATPESCGPSEPATSGSETPGSCAPTSGSETPGSPAGSCTSTEEGTSESATPESCGPTESASG

SEQ ID NO: 682 - protein, 449 aa, Artificial Sequence
  Description of Artificial Sequence: Synthetic polypeptide
GTSESATPESGPGSEPATSGSETPGTSESATPESGPGSEPATSGSETPGTSESATPESGPGTSTEPSEGSAPGSPAGSPTSTEEGTSESATPESGPGSEPATSGSETPGTSESATPESGPGSPAGSPTSTEEGSPAGSPTSTEEGTSTEPSEGSAPGTSESATPESGPGTSESATPESGPGTSESATPESGPGSEPATSGSETPGSEPATSGSETPGSPAGSPTSTEEGTSTEPSEGSAPGTSTEPSEGSAPGSEPATSGSETPGTSESATPESGPGTSTEPSEGSAPGSPLGLAGSLSGRSDNHGSPGAGSCAGSPTSTEEGTSESACSPEGPGTSTEPSEGSCGPSPAGSPTSTEEGTCTEPSEGSAPGTSEPTCSGSAPGTSESATPESCGPSEPATSGSETPGSCAPTSGSETPGSPAGSCTSTEEGTSESATPESCGPTESASG

SEQ ID NO: 683 - protein, 445 aa, Artificial Sequence
  Description of Artificial Sequence: Synthetic polypeptide
GTSESATPESGPGSEPATSGSETPGTSESATPESGPGSEPATSGSETPGTSESATPESGPGTSTEPSEGSAPGSPAGSPTSTEEGTSESATPESGPGSEPATSGSETPGTSESATPESGPGSPAGSPTSTEEGSPAGSPTSTEEGTSTEPSEGSAPGTSESATPESGPGTSESATPESGPGTSESATPESGPGSEPATSGSETPGSEPATSGSETPGSPAGSPTSTEEGTSTEPSEGSAPGTSTEPSEGSAPGSEPATSGSETPGTSESATPESGPGTSTEPSEGSAPGSPLGLSGRSDNHGSPGAGSCAGSPTSTEEGTSESACSPEGPGTSTEPSEGSCGPSPAGSPTSTEEGTCTEPSEGSAPGTSEPTCSGSAPGTSESATPESCGPSEPATSGSETPGSCAPTSGSETPGSPAGSCTSTEEGTSESATPESCGPTESASG

SEQ ID NO: 684 - protein, 449 aa, Artificial Sequence
  Description of Artificial Sequence: Synthetic polypeptide
GTSESATPESGPGSEPATSGSETPGTSESATPESGPGSEPATSGSETPGTSESATPESGPGTSTEPSEGSAPGSPAGSPTSTEEGTSESATPESGPGSEPATSGSETPGTSESATPESGPGSPAGSPTSTEEGSPAGSPTSTEEGTSTEPSEGSAPGTSESATPESGPGTSESATPESGPGTSESATPESGPGSEPATSGSETPGSEPATSGSETPGSPAGSPTSTEEGTSTEPSEGSAPGTSTEPSEGSAPGSEPATSGSETPGTSESATPESGPGTSTEPSEGSAPGLAGRSDNHVPLSLSMGGSPGAGSCAGSPTSTEEGTSESACSPEGPGTSTEPSEGSCGPSPAGSPTSTEEGTCTEPSEGSAPGTSEPTCSGSAPGTSESATPESCGPSEPATSGSETPGSCAPTSGSETPGSPAGSCTSTEEGTSESATPESCGPTESASG

SEQ ID NO: 685 - protein, 385 aa, Artificial Sequence
  Description of Artificial Sequence: Synthetic polypeptide
GTSESATPESGPGSEPATSGSETPGTSESATPESGPGSEPATSGSETPGTSESATPESGPGTSTEPSEGSAPGSPAGSPTSTEEGTSESATPESGPGSEPATSGSETPGTSESATPESGPGSPAGSPTSTEEGSPAGSPTSTEEGTSTEPSEGSAPGTSESATPESGPGTSESATPESGPGTSESATPESGPGSEPATSGSETPGSEPATSGSETPGSPAGSPTSTEEGTSTEPSEGSAPGTSTEPSEGSAPGSEPATSGSETPGTSESATPESGPGTSTEPSEGSAPGLSGRSDNHSPLGLAGSGSPGAGSCTETSPSTCPTESPEACGSGSGSPCSPSGTEACSTSGSEGCSPSSTAPCGPTETEGCTTSSGPPCPESATSEG

SEQ ID NO: 686 - protein, 385 aa, Artificial Sequence
  Description of Artificial Sequence: Synthetic polypeptide
GTSESATPESGPGSEPATSGSETPGTSESATPESGPGSEPATSGSETPGTSESATPESGPGTSTEPSEGSAPGSPAGSPTSTEEGTSESATPESGPGSEPATSGSETPGTSESATPESGPGSPAGSPTSTEEGSPAGSPTSTEEGTSTEPSEGSAPGTSESATPESGPGTSESATPESGPGTSESATPESGPGSEPATSGSETPGSEPATSGSETPGSPAGSPTSTEEGTSTEPSEGSAPGTSTEPSEGSAPGSEPATSGSETPGTSESATPESGPGTSTEPSEGSAPGSPLGLAGSLSGRSDNHGSPGAGSCTETSPSTCPTESPEACGSGSGSPCSPSGTEACSTSGSEGCSPSSTAPCGPTETEGCTTSSGPPCPESATSEG

SEQ ID NO: 687 - protein, 381 aa, Artificial Sequence
  Description of Artificial Sequence: Synthetic polypeptide
GTSESATPESGPGSEPATSGSETPGTSESATPESGPGSEPATSGSETPGTSESATPESGPGTSTEPSEGSAPGSPAGSPTSTEEGTSESATPESGPGSEPATSGSETPGTSESATPESGPGSPAGSPTSTEEGSPAGSPTSTEEGTSTEPSEGSAPGTSESATPESGPGTSESATPESGPGTSESATPESGPGSEPATSGSETPGSEPATSGSETPGSPAGSPTSTEEGTSTEPSEGSAPGTSTEPSEGSAPGSEPATSGSETPGTSESATPESGPGTSTEPSEGSAPGSPLGLSGRSDNHGSPGAGSCTETSPSTCPTESPEACGSGSGSPCSPSGTEACSTSGSEGCSPSSTAPCGPTETEGCTTSSGPPCPESATSEG

SEQ ID NO: 688 - protein, 385 aa, Artificial Sequence
  Description of Artificial Sequence: Synthetic polypeptide
GTSESATPESGPGSEPATSGSETPGTSESATPESGPGSEPATSGSETPGTSESATPESGPGTSTEPSEGSAPGSPAGSPTSTEEGTSESATPESGPGSEPATSGSETPGTSESATPESGPGSPAGSPTSTEEGSPAGSPTSTEEGTSTEPSEGSAPGTSESATPESGPGTSESATPESGPGTSESATPESGPGSEPATSGSETPGSEPATSGSETPGSPAGSPTSTEEGTSTEPSEGSAPGTSTEPSEGSAPGSEPATSGSETPGTSESATPESGPGTSTEPSEGSAPGLAGRSDNHVPLSLSMGGSPGAGSCTETSPSTCPTESPEACGSGSGSPCSPSGTEACSTSGSEGCSPSSTAPCGPTETEGCTTSSGPPCPESATSEG

SEQ ID NO: 689 - protein, 315 aa, Artificial Sequence
  Description of Artificial Sequence: Synthetic polypeptide
GTSESATPESGPGSEPATSGSETPGTSESATPESGPGSEPATSGSETPGTSESATPESGPGTSTEPSEGSAPGSPAGSPTSTEEGTSESATPESGPGSEPATSGSETPGTSESATPESGPGSPAGSPTSTEEGSPAGSPTSTEEGTSTEPSEGSAPGTSESATPESGPGTSESATPESGPGTSESATPESGPGSEPATSGSETPGSEPATSGSETPGSPAGSPTSTEEGTSTEPSEGSAPGTSTEPSEGSAPGSEPATSGSETPGTSESATPESGPGTSTEPSEGSAPGLSGRSDNHSPLGLAGSGSPGAGSCAG

SEQ ID NO: 690 - protein, 315 aa, Artificial Sequence
  Description of Artificial Sequence: Synthetic polypeptide
GTSESATPESGPGSEPATSGSETPGTSESATPESGPGSEPATSGSETPGTSESATPESGPGTSTEPSEGSAPGSPAGSPTSTEEGTSESATPESGPGSEPATSGSETPGTSESATPESGPGSPAGSPTSTEEGSPAGSPTSTEEGTSTEPSEGSAPGTSESATPESGPGTSESATPESGPGTSESATPESGPGSEPATSGSETPGSEPATSGSETPGSPAGSPTSTEEGTSTEPSEGSAPGTSTEPSEGSAPGSEPATSGSETPGTSESATPESGPGTSTEPSEGSAPGSPLGLAGSLSGRSDNHGSPGAGSCAG

SEQ ID NO: 691 - protein, 311 aa, Artificial Sequence; identical to SEQ ID NO: 667
  Description of Artificial Sequence: Synthetic polypeptide

SEQ ID NO: 692 - protein, 315 aa, Artificial Sequence; identical to SEQ ID NO: 668
  Description of Artificial Sequence: Synthetic polypeptide

SEQ ID NO: 693 - protein, 311 aa, Artificial Sequence; identical to SEQ ID NO: 669
  Description of Artificial Sequence: Synthetic polypeptide

SEQ ID NO: 694 - protein, 311 aa, Artificial Sequence; identical to SEQ ID NO: 670
  Description of Artificial Sequence: Synthetic polypeptide

SEQ ID NO: 695 - protein, 307 aa, Artificial Sequence; identical to SEQ ID NO: 671
  Description of Artificial Sequence: Synthetic polypeptide

SEQ ID NO: 696 - protein, 311 aa, Artificial Sequence; identical to SEQ ID NO: 672
  Description of Artificial Sequence: Synthetic polypeptide

SEQ ID NO: 697 - protein, 347 aa, Artificial Sequence; identical to SEQ ID NO: 673
  Description of Artificial Sequence: Synthetic polypeptide

SEQ ID NO: 698 - protein, 347 aa, Artificial Sequence; identical to SEQ ID NO: 674
  Description of Artificial Sequence: Synthetic polypeptide

SEQ ID NO: 699 - protein, 343 aa, Artificial Sequence; identical to SEQ ID NO: 675
  Description of Artificial Sequence: Synthetic polypeptide

SEQ ID NO: 700 - protein, 347 aa, Artificial Sequence; identical to SEQ ID NO: 676
  Description of Artificial Sequence: Synthetic polypeptide

SEQ ID NO: 701 - protein, 319 aa, Artificial Sequence; identical to SEQ ID NO: 677
  Description of Artificial Sequence: Synthetic polypeptide

SEQ ID NO: 702 - protein, 319 aa, Artificial Sequence; identical to SEQ ID NO: 678
  Description of Artificial Sequence: Synthetic polypeptide

SEQ ID NO: 703 - protein, 315 aa, Artificial Sequence; identical to SEQ ID NO: 679
  Description of Artificial Sequence: Synthetic polypeptide

SEQ ID NO: 704 - protein, 319 aa, Artificial Sequence; identical to SEQ ID NO: 680
  Description of Artificial Sequence: Synthetic polypeptide

SEQ ID NO: 705 - protein, 449 aa, Artificial Sequence; identical to SEQ ID NO: 681
  Description of Artificial Sequence: Synthetic polypeptide

SEQ ID NO: 706 - protein, 449 aa, Artificial Sequence; identical to SEQ ID NO: 682
  Description of Artificial Sequence: Synthetic polypeptide

SEQ ID NO: 707 - protein, 445 aa, Artificial Sequence; identical to SEQ ID NO: 683
  Description of Artificial Sequence: Synthetic polypeptide

SEQ ID NO: 708 - protein, 449 aa, Artificial Sequence; identical to SEQ ID NO: 684
  Description of Artificial Sequence: Synthetic polypeptide

SEQ ID NO: 709 - protein, 385 aa, Artificial Sequence; identical to SEQ ID NO: 685
  Description of Artificial Sequence: Synthetic polypeptide

SEQ ID NO: 710 - protein, 385 aa, Artificial Sequence; identical to SEQ ID NO: 686
  Description of Artificial Sequence: Synthetic polypeptide

SEQ ID NO: 711 - protein, 381 aa, Artificial Sequence; identical to SEQ ID NO: 687
  Description of Artificial Sequence: Synthetic polypeptide

SEQ ID NO: 712 - protein, 385 aa, Artificial Sequence; identical to SEQ ID NO: 688
  Description of Artificial Sequence: Synthetic polypeptide

SEQ ID NO: 713 - DNA, 2691 bp, Artificial Sequence
  Description of Artificial Sequence: Synthetic polynucleotide
atgaaaaacccagagcaagcagaagaacaagctgaagaacagcgcgaagaaacaagcgcgtctcgttccgctgggtctccaacggcagaagccgctggctgcggtactgctgaagcggcaacctctgaatccgctactccagaatccggtcctggtactagcactgagccaagcgaaggttctgctccaggctccccggcaggtagccctacctctaccgaagagggcactagcaccgaaccatctgagggttccgctcctggcacctccactgaaccgtccgaaggcagtgctccgggtacttccgaaagcgcaactccggaatccggccctggttctgagcctgctacttccggctctgaaactccaggtagcgagccagcgacttctggttctgaaactccaggttcaccggcgggtagcccgacgagcacggaggaaggtacctctgagtcggccactcctgagtccggtccgggcacgagcaccgagccgagcgagggttcagccccgggtaccagcacggagccgtccgagggtagcgcaccgggttctccggcgggctcccctacgtctacggaagagggtacgtccactgaacctagcgagggcagcgcgccaggcaccagcactgaaccgagcgaaggcagcgcacctggcactagcgagtctgcgactccggagagcggtccgggtacgagcacggaaccaagcgaaggcagcgccccaggtacctctgaatctgctaccccagaatctggcccgggttccgagccagctacctctggttctgaaaccccaggtacttccactgaaccaagcgaaggtagcgctcctggcacttctactgaaccatccgaaggttccgctcctggtacgtctgaaagcgctacccctgaaagcggcccaggcacctctgaaagcgctactcctgagagcggtccaggctctccagcaggttctccaacctccactgaagaaggcacctctgagtctgctacccctgaatctggtcctggctccgaacctgctacctctggttccgaaactccaggtacctcggaatctgcgactccggaatctggcccgggcacgagcacggagccgtctgagggtagcgcaccaggtaccagcactgagccttctgagggctctgcaccgggtacctccacggaaccttcggaaggttctgcgccgggtacctccactgagccatccgagggttcagcaccaggtactagcacggaaccgtccgagggctctgcaccaggtacgagcaccgaaccgtcggagggtagcgctccaggtagcccagcgggctctccgacaagcaccgaagaaaccgctgaagccgcaggttgtggcactgcggaagctgcaacaagcgagagcgcgactcctgaatctggtccgggtagcgagcctgcaaccagcggttctgagacgccgggcacttccgaatctgcgaccccggagtccggtccaggttcagagccggcgacgagcggttcggaaacgccgggtacgtctgaatcagccacgccggagtctggtccgggtacctcgaccgaaccaagcgaaggttcggcaccgggtactagcgagagcgcaacccctgaaagcggtccgggcagcccggcaggttctccaaccagcaccgaagaaggttcccctgctggtagcccgacctctacggaggaaggtagccctgcaggttccccaacttctactgaggaaggtacttctgagtccgctaccccagaaagcggtcctggtacctccactgaaccgtctgaaggctctgcaccaggcacttctgagtctgctactccagaaagcggcccaggttctgaaccagcaacttctggctctgagactccaggcacttctgagtccgcaacgcctgaatccggtcctggttctgaaccagctacttccggcagcgaaaccccaggtacctctgagtctgcgactccagagtctggtcctggtacttccactgagcctagcgagggttccgcaccaggttctccggctggtagcccgaccagcacggaggagggtacgtctgaatctgcaacgccggaatcgggcccaggttcggagcctgcaacgtctggcagcgaaaccccgggtacctccgaatctgctacaccggaaagcggtcctggcagccctgctggttctccaacctctaccgaggagggttcaccggcaggtagcccgactagcactgaagaaggtactagcacggagccgagcgagggtagtgctccgggtacgagcgagagcgcaacgccagagagcggtccaggcaccagcgaatcggccacccctgagagcggcccaggtacttctgagagcgccactcctgaatccggccctggtagcgagccggcaacctccggctcagaaactcctggttcggaaccagcgaccagcggttctgaaactccgggtagcccggcaggcagcccaacgagcaccgaagagggtaccagcacggaaccgagcgagggttctgccccgggtacttccaccgaaccatcggagggctctgcacctggtagcgaacctgcgacgtctggttctgaaacgccgggtagcactgcagaagcggctggttgtggcaccgccgaagcagctagcgcctctcgctccgcacatcaccatcaccaccatcatcactaa

SEQ ID NO: 714 - protein, 896 aa, Artificial Sequence
  Description of Artificial Sequence: Synthetic polypeptide
MKNPEQAEEQAEEQREETSASRSAGSPTAEAAGCGTAEAATSESATPESGPGTSTEPSEGSAPGSPAGSPTSTEEGTSTEPSEGSAPGTSTEPSEGSAPGTSESATPESGPGSEPATSGSETPGSEPATSGSETPGSPAGSPTSTEEGTSESATPESGPGTSTEPSEGSAPGTSTEPSEGSAPGSPAGSPTSTEEGTSTEPSEGSAPGTSTEPSEGSAPGTSESATPESGPGTSTEPSEGSAPGTSESATPESGPGSEPATSGSETPGTSTEPSEGSAPGTSTEPSEGSAPGTSESATPESGPGTSESATPESGPGSPAGSPTSTEEGTSESATPESGPGSEPATSGSETPGTSESATPESGPGTSTEPSEGSAPGTSTEPSEGSAPGTSTEPSEGSAPGTSTEPSEGSAPGTSTEPSEGSAPGTSTEPSEGSAPGSPAGSPTSTEETAEAAGCGTAEAATSESATPESGPGSEPATSGSETPGTSESATPESGPGSEPATSGSETPGTSESATPESGPGTSTEPSEGSAPGTSESATPESGPGSPAGSPTSTEEGSPAGSPTSTEEGSPAGSPTSTEEGTSESATPESGPGTSTEPSEGSAPGTSESATPESGPGSEPATSGSETPGTSESATPESGPGSEPATSGSETPGTSESATPESGPGTSTEPSEGSAPGSPAGSPTSTEEGTSESATPESGPGSEPATSGSETPGTSESATPESGPGSPAGSPTSTEEGSPAGSPTSTEEGTSTEPSEGSAPGTSESATPESGPGTSESATPESGPGTSESATPESGPGSEPATSGSETPGSEPATSGSETPGSPAGSPTSTEEGTSTEPSEGSAPGTSTEPSEGSAPGSEPATSGSETPGSTAEAAGCGTAEAASASRSAHHHHHHHH

SEQ ID NO: 715 - DNA, 2421 bp, Artificial Sequence
  Description of Artificial Sequence: Synthetic polynucleotide
atgaaaaacccagagcaagcagaagaacaagctgaagaacagcgcgaagaaacaagcgcgtctcgtgggtctccaggtgcaggtagctgcgctggtagcccaacctctaccgaagaaggtacctctgaatccgcttgttccccagaaggtcctggtactagcactgagccaagcgaaggttcttgtggcggtcctggtagcccagctggtagcccaacctctaccgaagaaggtacctctgaatccgctactccagaatccggtcctggtactagcactgagccaagcgaaggttctgctccaggctccccggcaggtagccctacctctaccgaagagggcactagcaccgaaccatctgagggttccgctcctggcacctccactgaaccgtccgaaggcagtgctccgggtacttccgaaagcgcaactccggaatccggccctggttctgagcctgctacttccggctctgaaactccaggtagcgagccagcgacttctggttctgaaactccaggttcaccggcgggtagcccgacgagcacggaggaaggtacctctgagtcggccactcctgagtccggtccgggcacgagcaccgagccgagcgagggttcagccccgggtaccagcacggagccgtccgagggtagcgcaccgggttctccggcgggctcccctacgtctacggaagagggtacgtccactgaacctagcgagggcagcgcgccaggcaccagcactgaaccgagcgaaggcagcgcacctggcactagcgagtctgcgactccggagagcggtccgggtacgagcacggaaccaagcgaaggcagcgccccaggtacctctgaatctgctaccccagaatctggcccgggttccgagccagctacctctggttctgaaaccccaggtacttccactgaaccaagcgaaggtagcgctcctggcacttctactgaaccatccgaaggttccgctcctggtacgtctgaaagcgctacccctgaaagcggcccaggcacctctgaaagcgctactcctgagagcggtccaggctctccagcaggttctccaacctccactgaagaaggcacctctgagtctgctacccctgaatctggtcctggctccgaacctgctacctctggttccgaaactccaggtacctcggaatctgcgactccggaatctggcccgggcacgagcacggagccgtctgagggtagcgcaccaggtaccagcactgagccttctgagggctctgcaccgggtacctccacggaaccttcggaaggttctgcgccgggtacctccactgagccatccgagggttcagcaccaggtactagcacggaaccgtccgagggctctgcaccaggtacgagcaccgaaccgtcggagggtagcgctccaggtagcccagcgggctctccgacaagcaccgaagaaggcaccagcaccgagccgtccgaaggttccgcaccaggtacaagcgagagcgcgactcctgaatctggtccgggtagcgagcctgcaaccagcggttctgagacgccgggcacttccgaatctgcgaccccggagtccggtccaggttcagagccggcgacgagcggttcggaaacgccgggtacgtctgaatcagccacgccggagtctggtccgggtacctcgaccgaaccaagcgaaggttcggcaccgggtactagcgagagcgcaacccctgaaagcggtccgggcagcccggcaggttctccaaccagcaccgaagaaggttcccctgctggtagcccgacctctacggaggaaggtagccctgcaggttccccaacttctactgaggaaggtacttctgagtccgctaccccagaaagcggtcctggtacctccactgaaccgtctgaaggctctgcaccaggcacttctgagtctgctactccagaaagcggcccaggttctgaaccagcaacttctggctctgagactccaggcacttctgagtccgcaacgcctgaatccggtcctggttctgaaccagctacttccggcagcgaaaccccaggtacctctgagtctgcgactccagagtctggtcctggtacttccactgagcctagcgagggttccgcaccaggttctccggctggtagcccgaccagcacggaggagggtacgtctgaatctgcaacgccggaatcgggcccaggttcggagcctgcaacgtctggcagcgaaaccccgggtacctccgaatctgctacaccggaaagcggtcctggcagccctgctggttctccaacctctaccgaggagggttcaccggcaagcgcctctcgctccgcagaacagaaactgatctctgaagaggatctgtctccggctaccggtcatcaccatcaccaccatcatcactaa

SEQ ID NO: 716 - protein, 806 aa, Artificial Sequence
  Description of Artificial Sequence: Synthetic polypeptide
MKNPEQAEEQAEEQREETSASRGSPGAGSCAGSPTSTEEGTSESACSPEGPGTSTEPSEGSCGGPGSPAGSPTSTEEGTSESATPESGPGTSTEPSEGSAPGSPAGSPTSTEEGTSTEPSEGSAPGTSTEPSEGSAPGTSESATPESGPGSEPATSGSETPGSEPATSGSETPGSPAGSPTSTEEGTSESATPESGPGTSTEPSEGSAPGTSTEPSEGSAPGSPAGSPTSTEEGTSTEPSEGSAPGTSTEPSEGSAPGTSESATPESGPGTSTEPSEGSAPGTSESATPESGPGSEPATSGSETPGTSTEPSEGSAPGTSTEPSEGSAPGTSESATPESGPGTSESATPESGPGSPAGSPTSTEEGTSESATPESGPGSEPATSGSETPGTSESATPESGPGTSTEPSEGSAPGTSTEPSEGSAPGTSTEPSEGSAPGTSTEPSEGSAPGTSTEPSEGSAPGTSTEPSEGSAPGSPAGSPTSTEEGTSTEPSEGSAPGTSESATPESGPGSEPATSGSETPGTSESATPESGPGSEPATSGSETPGTSESATPESGPGTSTEPSEGSAPGTSESATPESGPGSPAGSPTSTEEGSPAGSPTSTEEGSPAGSPTSTEEGTSESATPESGPGTSTEPSEGSAPGTSESATPESGPGSEPATSGSETPGTSESATPESGPGSEPATSGSETPGTSESATPESGPGTSTEPSEGSAPGSPAGSPTSTEEGTSESATPESGPGSEPATSGSETPGTSESATPESGPGSPAGSPTSTEEGSPASASRSAEQKLISEEDLSPATGHHHHHHHH

SEQ ID NO: 717 - DNA, 2430 bp, Artificial Sequence
  Description of Artificial Sequence: Synthetic polynucleotide
atgaaaaacccagagcaagcagaagaacaagctgaagaacagcgcgaagaaacacaccatcaccatcatcaccaccattctgctagccgttccgctgaaaatctgtattttcagggctctccaggtgcaggtagctgcgctggtagcccaacctctaccgaagaaggtacctctgaatccgcttgttccccagaaggtcctggtactagcactgagccaagcgaaggttcttgtggcggtctgtcaggtcgttctgataaccattccccactgggtctggctgggtctccaggtagcccagctggtagcccaacctctaccgaagaaggtacctctgaatccgctactccagaatccggtcctggtactagcactgagccaagcgaaggttctgctccaggctccccggcaggtagccctacctctaccgaagagggcactagcaccgaaccatctgagggttccgctcctggcacctccactgaaccgtccgaaggcagtgctccgggtacttccgaaagcgcaactccggaatccggccctggttctgagcctgctacttccggctctgaaactccaggtagcgagccagcgacttctggttctgaaactccaggttcaccggcgggtagcccgacgagcacggaggaaggtacctctgagtcggccactcctgagtccggtccgggcacgagcaccgagccgagcgagggttcagccccgggtaccagcacggagccgtccgagggtagcgcaccgggttctccggcgggctcccctacgtctacggaagagggtacgtccactgaacctagcgagggcagcgcgccaggcaccagcactgaaccgagcgaaggcagcgcacctggcactagcgagtctgcgactccggagagcggtccgggtacgagcacggaaccaagcgaaggcagcgccccaggtacctctgaatctgctaccccagaatctggcccgggttccgagccagctacctctggttctgaaaccccaggtacttccactgaaccaagcgaaggtagcgctcctggcacttctactgaaccatccgaaggttccgctcctggtacgtctgaaagcgctacccctgaaagcggcccaggcacctctgaaagcgctactcctgagagcggtccaggctctccagcaggttctccaacctccactgaagaaggcacctctgagtctgctacccctgaatctggtcctggctccgaacctgctacctctggttccgaaactccaggtacctcggaatctgcgactccggaatctggcccgggcacgagcacggagccgtctgagggtagcgcaccaggtaccagcactgagccttctgagggctctgcaccgggtacctccacggaaccttcggaaggttctgcgccgggtacctccactgagccatccgagggttcagcaccaggtactagcacggaaccgtccgagggctctgcaccaggtacgagcaccgaaccgtcggagggtagcgctccaggtagcccagcgggctctccgacaagcaccgaagaaggcaccagcaccgagccgtccgaaggttccgcaccaggtacaagcgagagcgcgactcctgaatctggtccgggtagcgagcctgcaaccagcggttctgagacgccgggcacttccgaatctgcgaccccggagtccggtccaggttcagagccggcgacgagcggttcggaaacgccgggtacgtctgaatcagccacgccggagtctggtccgggtacctcgaccgaaccaagcgaaggttcggcaccgggtactagcgagagcgcaacccctgaaagcggtccgggcagcccggcaggttctccaaccagcaccgaagaaggttcccctgctggtagcccgacctctacggaggaaggtagccctgcaggttccccaacttctactgaggaaggtacttctgagtccgctaccccagaaagcggtcctggtacctccactgaaccgtctgaaggctctgcaccaggcacttctgagtctgctactccagaaagcggcccaggttctgaaccagcaacttctggctctgagactccaggcacttctgagtccgcaacgcctgaatccggtcctggttctgaaccagctacttccggcagcgaaaccccaggtacctctgagtctgcgactccagagtctggtcctggtacttccactgagcctagcgagggttccgcaccaggttctccggctggtagcccgaccagcacggaggagggtacgtctgaatctgcaacgccggaatcgggcccaggttcggagcctgcaacgtctggcagcgaaaccccgggtacctccgaatctgctacaccggaaagcggtcctggcagccctgctggttctccaacctctaccgaggagggttcaccggcataa

SEQ ID NO: 718 - protein, 809 aa, Artificial Sequence
  Description of Artificial Sequence: Synthetic polypeptide
MKNPEQAEEQAEEQREETHHHHHHHHSASRSAENLYFQGSPGAGSCAGSPTSTEEGTSESACSPEGPGTSTEPSEGSCGGLSGRSDNHSPLGLAGSPGSPAGSPTSTEEGTSESATPESGPGTSTEPSEGSAPGSPAGSPTSTEEGTSTEPSEGSAPGTSTEPSEGSAPGTSESATPESGPGSEPATSGSETPGSEPATSGSETPGSPAGSPTSTEEGTSESATPESGPGTSTEPSEGSAPGTSTEPSEGSAPGSPAGSPTSTEEGTSTEPSEGSAPGTSTEPSEGSAPGTSESATPESGPGTSTEPSEGSAPGTSESATPESGPGSEPATSGSETPGTSTEPSEGSAPGTSTEPSEGSAPGTSESATPESGPGTSESATPESGPGSPAGSPTSTEEGTSESATPESGPGSEPATSGSETPGTSESATPESGPGTSTEPSEGSAPGTSTEPSEGSAPGTSTEPSEGSAPGTSTEPSEGSAPGTSTEPSEGSAPGTSTEPSEGSAPGSPAGSPTSTEEGTSTEPSEGSAPGTSESATPESGPGSEPATSGSETPGTSESATPESGPGSEPATSGSETPGTSESATPESGPGTSTEPSEGSAPGTSESATPESGPGSPAGSPTSTEEGSPAGSPTSTEEGSPAGSPTSTEEGTSESATPESGPGTSTEPSEGSAPGTSESATPESGPGSEPATSGSETPGTSESATPESGPGSEPATSGSETPGTSESATPESGPGTSTEPSEGSAPGSPAGSPTSTEEGTSESATPESGPGSEPATSGSETPGTSESATPESGPGSPAGSPTSTEEGSPA

SEQ ID NO: 719 - protein, 18 aa, Artificial Sequence
  Description of Artificial Sequence: Synthetic peptide
MKNPEQAEEQAEEQREET

SEQ ID NO: 720 - protein, 6 aa, Artificial Sequence
  Description of Artificial Sequence: Synthetic peptide
SASRGS

SEQ ID NO: 721 - protein, 8 aa, Artificial Sequence
  Description of Artificial Sequence: Synthetic 8xHis tag
HHHHHHHH

SEQ ID NO: 722 - protein, 864 aa, Artificial Sequence; identical to SEQ ID NO: 367
  Description of Artificial Sequence: Synthetic polypeptide

SEQ ID NO: 723 - protein, 570 aa, Artificial Sequence
  Description of Artificial Sequence: Synthetic polypeptide
DIQMTQSPSSLSASVGDRVTITCRASQDVNTAVAWYQQKPGKAPKLLIYSASFLYSGVPSRFSGSRSGTDFTLTISSLQPEDFATYYCQQHYTTPPTFGQGTKVEIKTGSGEGSEGEGGGEGSEGEGSGEGGEGEGSGTEVQLVESGGGLVQPGGSLRLSCAASGFNIKDTYIHWVRQAPGKGLEWVARIYPTNGYTRYADSVKGRFTISADTSKNTAYLQMNSLRAEDTAVYYCSRWGGDGFYAMDYWGQGTLVTVSGSPGTSESATPESGPGSEPATSGSETPGTSESATPESGPGSEPATSGSETPGTSESATPESGPGTSTEPSEGSAPGSPAGSPTSTEEGTSESATPESGPGSEPATSGSETPGTSESATPESGPGSPAGSPTSTEEGSPAGSPTSTEEGTSTEPSEGSAPGTSESATPESGPGTSESATPESGPGTSESATPESGPGSEPATSGSETPGSEPATSGSETPGSPAGSPTSTEEGTSTEPSEGSAPGTSTEPSEGSAPGSEPATSGSETPGTSESATPESGPGTSTEPSEGSAPGGAPCGPAGGSSSHHHHHHHH

SEQ ID NO: 724 - protein, 432 aa, Artificial Sequence; identical to SEQ ID NO: 348
  Description of Artificial Sequence: Synthetic polypeptide

SEQ ID NO: 725 - protein, 310 aa, Artificial Sequence
  Description of Artificial Sequence: Synthetic polypeptide
DIQMTQSPSSLSASVGDRVTITCRASQDVNTAVAWYQQKPGKAPKLLIYSASFLYSGVPSRFSGSRSGTDFTLTISSLQPEDFATYYCQQHYTTPPTFGQGTKVEIKTGSGEGSEGEGGGEGSEGEGSGEGGEGEGSGTEVQLVESGGGLVQPGGSLRLSCAASGFNIKDTYIHWVRQAPGKGLEWVARIYPTNGYTRYADSVKGRFTISADTSKNTAYLQMNSLRAEDTAVYYCSRWGGDGFYAMDYWGQGTLVTVSGSPGSAGSGSETPGTSESATPESGPGTSTEPSGAPCGPAGGSSSHHHHHHHH

SEQ ID NO: 726 - protein, 759 aa, Artificial Sequence; identical to SEQ ID NO: 392
  Description of Artificial Sequence: Synthetic polypeptide

SEQ ID NO: 727 - protein, 310 aa, Artificial Sequence; identical to SEQ ID NO: 725
  Description of Artificial Sequence: Synthetic polypeptide

SEQ ID NO: 728 - protein, 42 aa, Artificial Sequence; identical to SEQ ID NO: 26
  Description of Artificial Sequence: Synthetic polypeptide

SEQ ID NO: 729 - protein, 16 aa, Artificial Sequence
  Description of Artificial Sequence: Synthetic peptide
LSGRSDNHSPLGLAGS

SEQ ID NO: 730 - protein, 713 aa, Artificial Sequence; identical to SEQ ID NO: 326
  Description of Artificial Sequence: Synthetic polypeptide

SEQ ID NO: 731 - protein, 4 aa, Artificial Sequence
  Description of Artificial Sequence: Synthetic peptide
GGSG

SEQ ID NO: 732 - protein, 288 aa, Artificial Sequence
  Description of Artificial Sequence: Synthetic polypeptide
GSGGEGGSGGSGGSGGEGGSGGSGGSGGEGGSGGSGGSGGEGGSGGSGGSGGEGGSGGSGGSGGEGGSGGSGGSGGEGGSGGSGGSGGEGGSGGSGGSGGEGGSGGSGGSGGEGGSGGSGGSGGEGGSGGSGGSGGEGGSGGSGGSGGEGGSGGSGGSGGEGGSGGSGGSGGEGGSGGSGGSGGEGGSGGSGGSGGEGGSGGSGGSGGEGGSGGSGGSGGEGGSGGSGGSGGEGGSGGSGGSGGEGGSGGSGGSGGEGGSGGSGGSGGEGGSGGSGGSGGEGGSGGSG

SEQ ID NO: 733 - protein, 288 aa, Artificial Sequence
  Description of Artificial Sequence: Synthetic polypeptide
GSGGEGGSGGEGGSGGEGGSGGEGGSGGEGGSGGEGGSGGEGGSGGEGGSGGEGGSGGEGGSGGEGGSGGEGGSGGEGGSGGEGGSGGEGGSGGEGGSGGEGGSGGEGGSGGEGGSGGEGGSGGEGGSGGEGGSGGEGGSGGEGGSGGEGGSGGEGGSGGEGGSGGEGGSGGEGGSGGEGGSGGEGGSGGEGGSGGEGGSGGEGGSGGEGGSGGEGGSGGEGGSGGEGGSGGEGGSGGEGGSGGEGGSGGEGGSGGEGGSGGEGGSGGEGGSGGEGGSGGEGGSGGEG

SEQ ID NO: 734 - protein, 288 aa, Artificial Sequence
  Description of Artificial Sequence: Synthetic polypeptide
GEGEGGGEGGEGEGGGEGGEGEGGGEGGEGEGGGEGGEGEGGGEGGEGEGGGEGGEGEGGGEGGEGEGGGEGGEGEGGGEGGEGEGGGEGGEGEGGGEGGEGEGGGEGGEGEGGGEGGEGEGGGEGGEGEGGGEGGEGEGGGEGGEGEGGGEGGEGEGGGEGGEGEGGGEGGEGEGGGEGGEGEGGGEGGEGEGGGEGGEGEGGGEGGEGEGGGEGGEGEGGGEGGEGEGGGEGGEGEGGGEGGEGEGGGEGGEGEGGGEGGEGEGGGEGGEGEGGGEGGEGEGGGEG

SEQ ID NO: 735 - protein, 288 aa, Artificial Sequence
  Description of Artificial Sequence: Synthetic polypeptide
SSESSESSSSESSSESSESSSSESSSESSESSSSESSSESSESSSSESSSESSESSSSESSSESSESSSSESSSESSESSSSESSSESSESSSSESSSESSESSSSESSSESSESSSSESSSESSESSSSESSSESSESSSSESSSESSESSSSESSSESSESSSSESSSESSESSSSESSSESSESSSSESSSESSESSSSESSSESSESSSSESSSESSESSSSESSSESSESSSSESSSESSESSSSESSSESSESSSSESSSESSESSSSESSSESSESSSSES

SEQ ID NO: 736 - protein, 288 aa, Artificial Sequence
  Description of Artificial Sequence: Synthetic polypeptide
GEGSGEGSEGEGSEGSGEGEGSEGSGEGEGGSEGSEGEGGSEGSEGEGGSEGSEGEGSGEGSEGEGGSEGSEGEGSGEGSEGEGSEGGSEGEGGSEGSEGEGSGEGSEGEGGEGGSEGEGSEGSGEGEGSGEGSEGEGSEGSGEGEGSGEGSEGEGSEGSGEGEGSEGSGEGEGGSEGSEGEGSEGSGEGEGGEGSGEGEGSGEGSEGEGGGEGSEGEGSGEGGEGEGSEGGSEGEGGSEGGEGEGSEGSGEGEGSEGGSEGEGSEGGSEGEGSEGSGEGEGSEGSGE

SEQ ID NO: 737 - protein, 42 aa, Artificial Sequence
  Description of Artificial Sequence: Synthetic polypeptide
TEPSEGSAPGSPAGSPTSTEEGTSESATPESGPGSEPATSGS

SEQ ID NO: 738 - protein, 42 aa, Artificial Sequence
  Description of Artificial Sequence: Synthetic polypeptide
PAGSPTSTEEGTSTEPSEGSAPGTSESATPESGPGSEPATSG

SEQ ID NO: 739 - protein, 42 aa, Artificial Sequence
  Description of Artificial Sequence: Synthetic polypeptide
SEPATSGSETPGTSESATPESGPGTSTEPSEGSAPGSPAGSP

SEQ ID NO: 740 - protein, 42 aa, Artificial Sequence
  Description of Artificial Sequence: Synthetic polypeptide
GAPSPSASTGTGPGTPGSGTASSSPGSSTPSGATGSPGPSGP

SEQ ID NO: 741 - protein, 42 aa, Artificial Sequence
  Description of Artificial Sequence: Synthetic polypeptide
GPGTPGSGTASSSPGSSTPSGATGSPGSSPSASTGTGPGASP

SEQ ID NO: 742 - protein, 42 aa, Artificial Sequence
  Description of Artificial Sequence: Synthetic polypeptide
SPSASTGTGPGASPGTSSTGSPGTPGSGTASSSPGSSTPSGA

SEQ ID NO: 743 - protein, 42 aa, Artificial Sequence
  Description of Artificial Sequence: Synthetic polypeptide
SASTGTGPGASPGTSSTGSPGTPGSGTASSSPGSSTPSGATG

SEQ ID NO: 744 - protein, 48 aa, Artificial Sequence
  Description of Artificial Sequence: Synthetic polypeptide
MAEPAGSPTSTEEGTPGSGTASSSPGSSTPSGATGSPGASPGTSSTGS

SEQ ID NO: 745 - protein, 48 aa, Artificial Sequence
  Description of Artificial Sequence: Synthetic polypeptide
MAEPAGSPTSTEEGASPGTSSTGSPGSSTPSGATGSPGSSTPSGATGS

SEQ ID NO: 746 - protein, 144 aa, Artificial Sequence; identical to SEQ ID NO: 240
  Description of Artificial Sequence: Synthetic polypeptide

SEQ ID NO: 747 - protein, 144 aa, Artificial Sequence; identical to SEQ ID NO: 250
  Description of Artificial Sequence: Synthetic polypeptide

SEQ ID NO: 748 - protein, 144 aa, Artificial Sequence; identical to SEQ ID NO: 252
  Description of Artificial Sequence: Synthetic polypeptide

SEQ ID NO: 749 - protein, 144 aa, Artificial Sequence; identical to SEQ ID NO: 251
  Description of Artificial Sequence: Synthetic polypeptide

SEQ ID NO: 750 - protein, 144 aa, Artificial Sequence; identical to SEQ ID NO: 257
  Description of Artificial Sequence: Synthetic polypeptide

SEQ ID NO: 751 - protein, 144 aa, Artificial Sequence; identical to SEQ ID NO: 258
  Description of Artificial Sequence: Synthetic polypeptide

SEQ ID NO: 752 - protein, 288 aa, Artificial Sequence; identical to SEQ ID NO: 259
  Description of Artificial Sequence: Synthetic polypeptide

SEQ ID NO: 753 - protein, 288 aa, Artificial Sequence; identical to SEQ ID NO: 261
  Description of Artificial Sequence: Synthetic polypeptide

SEQ ID NO: 754 - protein, 288 aa, Artificial Sequence; identical to SEQ ID NO: 262
  Description of Artificial Sequence: Synthetic polypeptide

SEQ ID NO: 755 - protein, 576 aa, Artificial Sequence
  Description of Artificial Sequence: Synthetic polypeptide
GSSESGSSEGGPGSGGEPSESGSSGSSESGSSEGGPGSSESGSSEGGPGSSESGSSEGGPGSSESGSSEGGPGSSESGSSEGGPGESPGGSSGSESGSEGSSGPGESSGSSESGSSEGGPGSSESGSSEGGPGSSESGSSEGGPGSGGEPSESGSSGESPGGSSGSESGESPGGSSGSESGSGGEPSESGSSGSSESGSSEGGPGSGGEPSESGSSGSGGEPSESGSSGSEGSSGPGESSGESPGGSSGSESGSGGEPSESGSSGSGGEPSESGSSGSGGEPSESGSSGSSESGSSEGGPGESPGGSSGSESGESPGGSSGSESGESPGGSSGSESGESPGGSSGSESGESPGGSSGSESGSSESGSSEGGPGSGGEPSESGSSGSEGSSGPGESSGSSESGSSEGGPGSGGEPSESGSSGSSESGSSEGGPGSGGEPSESGSSGESPGGSSGSESGESPGGSSGSESGSSESGSSEGGPGSGGEPSESGSSGSSESGSSEGGPGSGGEPSESGSSGSGGEPSESGSSGESPGGSSGSESGSEGSSGPGESSGSSESGSSEGGPGSEGSSGPGESS

SEQ ID NO: 756 - protein, 577 aa, Artificial Sequence
  Description of Artificial Sequence: Synthetic polypeptide
AGSPAGSPTSTEEGTSESATPESGPGTSTEPSEGSAPGSPAGSPTSTEEGTSTEPSEGSAPGTSTEPSEGSAPGTSESATPESGPGSEPATSGSETPGSEPATSGSETPGSPAGSPTSTEEGTSESATPESGPGTSTEPSEGSAPGTSTEPSEGSAPGSPAGSPTSTEEGTSTEPSEGSAPGTSTEPSEGSAPGTSESATPESGPGTSTEPSEGSAPGTSESATPESGPGSEPATSGSETPGTSTEPSEGSAPGTSTEPSEGSAPGTSESATPESGPGTSESATPESGPGSPAGSPTSTEEGTSESATPESGPGSEPATSGSETPGTSESATPESGPGTSTEPSEGSAPGTSTEPSEGSAPGTSTEPSEGSAPGTSTEPSEGSAPGTSTEPSEGSAPGTSTEPSEGSAPGSPAGSPTSTEEGTSTEPSEGSAPGTSESATPESGPGSEPATSGSETPGTSESATPESGPGSEPATSGSETPGTSESATPESGPGTSTEPSEGSAPGTSESATPESGPGSPAGSPTSTEEGSPAGSPTSTEEGSPAGSPTSTEEGTSESATPESGPGTSTEPSEGSAP

SEQ ID NO: 757 - protein, 540 aa, Artificial Sequence; identical to SEQ ID NO: 263
  Description of Artificial Sequence: Synthetic polypeptide

SEQ ID NO: 758 - protein, 504 aa, Artificial Sequence
  Description of Artificial Sequence: Synthetic polypeptide
GASPGTSSTGSPGSSPSASTGTGPGSSPSASTGTGPGTPGSGTASSSPGSSTPSGATGSPGSNPSASTGTGPGASPGTSSTGSPGTPGSGTASSSPGSSTPSGATGSPGTPGSGTASSSPGASPGTSSTGSPGASPGTSSTGSPGTPGSGTASSSPGSSTPSGATGSPGASPGTSSTGSPGTPGSGTASSSPGSSTPSGATGSPGSNPSASTGTGPGSSPSASTGTGPGSSTPSGATGSPGSSTPSGATGSPGASPGTSSTGSPGASPGTSSTGSPGASPGTSSTGSPGTPGSGTASSSPGASPGTSSTGSPGASPGTSSTGSPGASPGTSSTGSPGSSPSASTGTGPGTPGSGTASSSPGASPGTSSTGSPGASPGTSSTGSPGASPGTSSTGSPGSSTPSGATGSPGSSTPSGATGSPGASPGTSSTGSPGTPGSGTASSSPGSSTPSGATGSPGSSTPSGATGSPGSSTPSGATGSPGSSPSASTGTGPGASPGTSSTGSP

SEQ ID NO: 759 - protein, 576 aa, Artificial Sequence; identical to SEQ ID NO: 266
  Description of Artificial Sequence: Synthetic polypeptide

SEQ ID NO: 760 - protein, 836 aa, Artificial Sequence
  Description of Artificial Sequence: Synthetic polypeptide
GSSESGSSEGGPGSSESGSSEGGPGESPGGSSGSESGSGGEPSESGSSGESPGGSSGSESGESPGGSSGSESGSSESGSSEGGPGSSESGSSEGGPGSSESGSSEGGPGESPGGSSGSESGESPGGSSGSESGESPGGSSGSESGSSESGSSEGGPGSSESGSSEGGPGSSESGSSEGGPGSSESGSSEGGPGSSESGSSEGGPGSSESGSSEGGPGSGGEPSESGSSGESPGGSSGSESGESPGGSSGSESGSGGEPSESGSSGSEGSSGPGESSGSSESGSSEGGPGSGGEPSESGSSGSEGSSGPGESSGSSESGSSEGGPGSGGEPSESGSSGESPGGSSGSESGSGGEPSESGSSGSGGEPSESGSSGSSESGSSEGGPGSGGEPSESGSSGSGGEPSESGSSGSEGSSGPGESSGESPGGSSGSESGSEGSSGPGESSGSEGSSGPGESSGSGGEPSESGSSGSSESGSSEGGPGSSESGSSEGGPGESPGGSSGSESGSGGEPSESGSSGSEGSSGPGESSGESPGGSSGSESGSEGSSGPGSSESGSSEGGPGSGGEPSESGSSGSEGSSGPGESSGSEGSSGPGESSGSEGSSGPGESSGSGGEPSESGSSGSGGEPSESGSSGESPGGSSGSESGESPGGSSGSESGSGGEPSESGSSGSEGSSGPGESSGESPGGSSGSESGSSESGSSEGGPGSSESGSSEGGPGSSESGSSEGGPGSGGEPSESGSSGSSESGSSEGGPGESPGGSSGSESGSGGEPSESGSSGSSESGSSEGGPGESPGGSSGSESGSGGEPSESGSSGESPGGSSGSESGSGGEPSESGSS

SEQ ID NO: 761 - protein, 816 aa, Artificial Sequence
  Description of Artificial Sequence: Synthetic polypeptide
GSPAGSPTSTEEGTSESATPESGPGTSTEPSEGSAPGSPAGSPTSTEEGTSTEPSEGSAPGTSTEPSEGSAPGTSESATPESGPGSEPATSGSETPGSEPATSGSETPGSPAGSPTSTEEGTSESATPESGPGTSTEPSEGSAPGTSTEPSEGSAPGSPAGSPTSTEEGTSTEPSEGSAPGTSTEPSEGSAPGTSESATPESGPGTSTEPSEGSAPGTSESATPESGPGSEPATSGSETPGTSTEPSEGSAPGTSTEPSEGSAPGTSESATPESGPGTSESATPESGPGSPAGSPTSTEEGTSESATPESGPGSEPATSGSETPGTSESATPESGPGTSTEPSEGSAPGTSTEPSEGSAPGTSTEPSEGSAPGTSTEPSEGSAPGTSTEPSEGSAPGTSTEPSEGSAPGSPAGSPTSTEEGTSTEPSEGSAPGTSESATPESGPGSEPATSGSETPGTSESATPESGPGSEPATSGSETPGTSESATPESGPGTSTEPSEGSAPGTSESATPESGPGSPAGSPTSTEEGSPAGSPTSTEEGSPAGSPTSTEEGTSESATPESGPGTSTEPSEGSAPGTSESATPESGPGSEPATSGSETPGTSESATPESGPGSEPATSGSETPGTSESATPESGPGTSTEPSEGSAPGSPAGSPTSTEEGTSESATPESGPGSEPATSGSETPGTSESATPESGPGSPAGSPTSTEEGSPAGSPTSTEEGTSTEPSEGSAPGTSESATPESGPGTSESATPESGPGTSESATPESGPGSEPATSGSETPGSEPATSGSETPGSPAGSPTSTEEGTSTEPSEGSAP

SEQ ID NO: 762 - protein, 864 aa, Artificial Sequence; identical to SEQ ID NO: 269
  Description of Artificial Sequence: Synthetic polypeptide

SEQ ID NO: 763 - protein, 864 aa, Artificial Sequence; identical to SEQ ID NO: 270
  Description of Artificial Sequence: Synthetic polypeptide

SEQ ID NO: 764 - protein, 875 aa, Artificial Sequence
  Description of Artificial Sequence: Synthetic polypeptide
GTSTEPSEGSAPGSEPATSGSETPGSPAGSPTSTEEGSTSSTAESPGPGTSTPESGSASPGSTSESPSGTAPGSTSESPSGTAPGTSTPESGSASPGTSTPESGSASPGSEPATSGSETPGTSESATPESGPGSPAGSPTSTEEGTSTEPSEGSAPGTSESATPESGPGTSTEPSEGSAPGTSTEPSEGSAPGSPAGSPTSTEEGTSTEPSEGSAPGTSTEPSEGSAPGTSESATPESGPGTSESATPESGPGTSTEPSEGSAPGTSTEPSEGSAPGTSESATPESGPGTSTEPSEGSAPGSEPATSGSETPGSPAGSPTSTEEGSSTPSGATGSPGTPGSGTASSSPGSSTPSGATGSPGTSTEPSEGSAPGTSTEPSEGSAPGSEPATSGSETPGSPAGSPTSTEEGSPAGSPTSTEEGTSTEPSEGSAPGASASGAPSTGGTSESATPESGPGSPAGSPTSTEEGSPAGSPTSTEEGSTSSTAESPGPGSTSESPSGTAPGTSPSGESSTAPGTPGSGTASSSPGSSTPSGATGSPGSSPSASTGTGPGSEPATSGSETPGTSESATPESGPGSEPATSGSETPGSTSSTAESPGPGSTSSTAESPGPGTSPSGESSTAPGSEPATSGSETPGSEPATSGSETPGTSTEPSEGSAPGSTSSTAESPGPGTSTPESGSASPGSTSESPSGTAPGTSTEPSEGSAPGTSTEPSEGSAPGTSTEPSEGSAPGSSTPSGATGSPGSSPSASTGTGPGASPGTSSTGSPGSEPATSGSETPGTSESATPESGPGSPAGSPTSTEEGSSTPSGATGSPGSSPSASTGTGPGASPGTSSTGSPGTSESATPESGPGTSTEPSEGSAPGTSTEPSEGSAP

SEQ ID NO: 765 - protein, 1318 aa, Artificial Sequence
  Description of Artificial Sequence: Synthetic polypeptide
GTSTEPSEGSAPGSEPATSGSETPGSPAGSPTSTEEGSTSSTAESPGPGTSTPESGSASPGSTSESPSGTAPGSTSESPSGTAPGTSTPESGSASPGTSTPESGSASPGSEPATSGSETPGTSESATPESGPGSPAGSPTSTEEGTSTEPSEGSAPGTSESATPESGPGTSTEPSEGSAPGTSTEPSEGSAPGSPAGSPTSTEEGTSTEPSEGSAPGTSTEPSEGSAPGTSESATPESGPGTSESATPESGPGTSTEPSEGSAPGTSTEPSEGSAPGTSESATPESGPGTSTEPSEGSAPGSEPATSGSETPGSPAGSPTSTEEGSSTPSGATGSPGTPGSGTASSSPGSSTPSGATGSPGTSTEPSEGSAPGTSTEPSEGSAPGSEPATSGSETPGSPAGSPTSTEEGSPAGSPTSTEEGTSTEPSEGSAPGPEPTGPAPSGGSEPATSGSETPGTSESATPESGPGSPAGSPTSTEEGTSESATPESGPGSPAGSPTSTEEGSPAGSPTSTEEGTSESATPESGPGSPAGSPTSTEEGSPAGSPTSTEEGSTSSTAESPGPGSTSESPSGTAPGTSPSGESSTAPGSTSESPSGTAPGSTSESPSGTAPGTSPSGESSTAPGTSTEPSEGSAPGTSESATPESGPGTSESATPESGPGSEPATSGSETPGTSESATPESGPGTSESATPESGPGTSTEPSEGSAPGTSESATPESGPGTSTEPSEGSAPGTSPSGESSTAPGTSPSGESSTAPGTSPSGESSTAPGTSTEPSEGSAPGSPAGSPTSTEEGTSTEPSEGSAPGSSPSASTGTGPGSSTPSGATGSPGSSTPSGATGSPGSSTPSGATGSPGSSTPSGATGSPGASPGTSSTGSPGASASGAPSTGGTSPSGESSTAPGSTSSTAESPGPGTSPSGESSTAPGTSESATPESGPGTSTEPSEGSAPGTSTEPSEGSAPGSSPSASTGTGPGSSTPSGATGSPGASPGTSSTGSPGTSTPESGSASPGTSPSGESSTAPGTSPSGESSTAPGTSESATPESGPGSEPATSGSETPGTSTEPSEGSAPGSTSESPSGTAPGSTSESPSGTAPGTSTPESGSASPGSPAGSPTSTEEGTSESATPESGPGTSTEPSEGSAPGSPAGSPTSTEEGTSESATPESGPGSEPATSGSETPGSSTPSGATGSPGASPGTSSTGSPGSSTPSGATGSPGSTSESPSGTAPGTSPSGESSTAPGSTSSTAESPGPGSSTPSGATGSPGASPGTSSTGSPGTPGSGTASSSPGSPAGSPTSTEEGSPAGSPTSTEEGTSTEPSEGSAP

SEQ ID NO: 766 - protein, 924 aa, Artificial Sequence
  Description of Artificial Sequence: Synthetic polypeptide
MAEPAGSPTSTEEGASPGTSSTGSPGSSTPSGATGSPGSSTPSGATGSPGTSTEPSEGSAPGSEPATSGSETPGSPAGSPTSTEEGSTSSTAESPGPGTSTPESGSASPGSTSESPSGTAPGSTSESPSGTAPGTSTPESGSASPGTSTPESGSASPGSEPATSGSETPGTSESATPESGPGSPAGSPTSTEEGTSTEPSEGSAPGTSESATPESGPGTSTEPSEGSAPGTSTEPSEGSAPGSPAGSPTSTEEGTSTEPSEGSAPGTSTEPSEGSAPGTSESATPESGPGTSESATPESGPGTSTEPSEGSAPGTSTEPSEGSAPGTSESATPESGPGTSTEPSEGSAPGSEPATSGSETPGSPAGSPTSTEEGSSTPSGATGSPGTPGSGTASSSPGSSTPSGATGSPGTSTEPSEGSAPGTSTEPSEGSAPGSEPATSGSETPGSPAGSPTSTEEGSPAGSPTSTEEGTSTEPSEGSAPGASASGAPSTGGTSESATPESGPGSPAGSPTSTEEGSPAGSPTSTEEGSTSSTAESPGPGSTSESPSGTAPGTSPSGESSTAPGTPGSGTASSSPGSSTPSGATGSPGSSPSASTGTGPGSEPATSGSETPGTSESATPESGPGSEPATSGSETPGSTSSTAESPGPGSTSSTAESPGPGTSPSGESSTAPGSEPATSGSETPGSEPATSGSETPGTSTEPSEGSAPGSTSSTAESPGPGTSTPESGSASPGSTSESPSGTAPGTSTEPSEGSAPGTSTEPSEGSAPGTSTEPSEGSAPGSSTPSGATGSPGSSPSASTGTGPGASPGTSSTGSPGSEPATSGSETPGTSESATPESGPGSPAGSPTSTEEGSSTPSGATGSPGSSPSASTGTGPGASPGTSSTGSPGTSESATPESGPGTSTEPSEGSAPGTSTEPSEGSAP

SEQ ID NO: 767 - protein, 913 aa, Artificial Sequence
  Description of Artificial Sequence: Synthetic polypeptide
MAEPAGSPTSTEEGTPGSGTASSSPGSSTPSGATGSPGASPGTSSTGSPGSPAGSPTSTEEGTSESATPESGPGTSTEPSEGSAPGSPAGSPTSTEEGTSTEPSEGSAPGTSTEPSEGSAPGTSESATPESGPGSEPATSGSETPGSEPATSGSETPGSPAGSPTSTEEGTSESATPESGPGTSTEPSEGSAPGTSTEPSEGSAPGSPAGSPTSTEEGTSTEPSEGSAPGTSTEPSEGSAPGTSESATPESGPGTSTEPSEGSAPGTSESATPESGPGSEPATSGSETPGTSTEPSEGSAPGTSTEPSEGSAPGTSESATPESGPGTSESATPESGPGSPAGSPTSTEEGTSESATPESGPGSEPATSGSETPGTSESATPESGPGTSTEPSEGSAPGTSTEPSEGSAPGTSTEPSEGSAPGTSTEPSEGSAPGTSTEPSEGSAPGTSTEPSEGSAPGSPAGSPTSTEEGTSTEPSEGSAPGTSESATPESGPGSEPATSGSETPGTSESATPESGPGSEPATSGSETPGTSESATPESGPGTSTEPSEGSAPGTSESATPESGPGSPAGSPTSTEEGSPAGSPTSTEEGSPAGSPTSTEEGTSESATPESGPGTSTEPSEGSAPGTSESATPESGPGSEPATSGSETPGTSESATPESGPGSEPATSGSETPGTSESATPESGPGTSTEPSEGSAPGSPAGSPTSTEEGTSESATPESGPGSEPATSGSETPGTSESATPESGPGSPAGSPTSTEEGSPAGSPTSTEEGTSTEPSEGSAPGTSESATPESGPGTSESATPESGPGTSESATPESGPGSEPATSGSETPGSEPATSGSETPGSPAGSPTSTEEGTSTEPSEGSAPGTSTEPSEGSAPGSEPATSGSETPGTSESATPESGPGTSTEPSEGSAP

SEQ ID NO: 768 - protein, 10 aa, Artificial Sequence
  Description of Artificial Sequence: Synthetic peptide
  MOD_RES (10)..(10): Any amino acid
GGGSLPETGX

SEQ ID NO: 769 - protein, 11 aa, Artificial Sequence
  Description of Artificial Sequence: Synthetic peptide
GGGSLPETGGG

SEQ ID NO: 770 - protein, 759 aa, Artificial Sequence; identical to SEQ ID NO: 392
  Description of Artificial Sequence: Synthetic polypeptide
  MOD_RES (8)..(8): Cys side-chain modified with IA-Val-Cit-PAB-MMAE moiety
  MOD_RES (24)..(24): Cys side-chain modified with IA-Val-Cit-PAB-MMAE moiety
  MOD_RES (40)..(40): Cys side-chain modified with IA-Val-Cit-PAB-MMAE moiety

SEQ ID NO: 771 - protein, 771 aa, Artificial Sequence; identical to SEQ ID NO: 393
  Description of Artificial Sequence: Synthetic polypeptide
  MOD_RES (8)..(8): Cys side-chain modified with IA-Val-Cit-PAB-MMAE moiety
  MOD_RES (24)..(24): Cys side-chain modified with IA-Val-Cit-PAB-MMAE moiety
  MOD_RES (40)..(40): Cys side-chain modified with IA-Val-Cit-PAB-MMAE moiety

1.-105. (canceled)

106. A cysteine containing domain (CCD) comprising at least 12 to about 144 amino acid residues, between 3 and 9 of which are cysteine residues, wherein the CCD is characterized in that:
(a) at least 90% of the non-cysteine residues consist of 3 to 6 types of amino acids selected from the group consisting of glycine (G), alanine (A), serine (S), threonine (T), glutamate (E) and proline (P);
(b) no three contiguous amino acids are identical unless the amino acid is cysteine or serine; and
(c) no glutamate residue is adjacent to a cysteine residue.

107. The CCD of claim 106, wherein at least one cysteine residue is located within 9 consecutive amino acid residues counting from an N-terminus or a C-terminus of the CCD.

108. The CCD of claim 106, wherein the CCD sequence has at least 90% sequence identity to a sequence set forth in Table 6.

109. A recombinant polypeptide comprising the CCD of claim 106 and an extended recombinant polypeptide (XTEN), said XTEN comprising at least 144 to about 864 amino acids devoid of cysteine residues, and wherein said XTEN consists of at least 3 types of amino acids selected from the group consisting of glycine (G), alanine (A), serine (S), threonine (T), glutamate (E), and proline (P).

110. The recombinant polypeptide of claim 109, wherein the XTEN 15 characterized in that:
(a) it has a molecular weight that is at least 4-fold greater than the molecular weight of the CCD; and
(b) it has at least 90% sequence identity to a sequence set forth in Table 10.

111. The recombinant polypeptide of claim 109, further comprising a peptidic cleavage moiety (PCM) between the CCD and the XTEN, wherein the PCM is capable of being cleaved by a mammalian protease.

112. The recombinant polypeptide of claim 111, wherein the PCM is capable of being cleaved by a mammalian protease set forth in Table 7.

113. The recombinant polypeptide of claim 111, further comprising a payload molecule chemically conjugated to a thiol group of a cysteine residue of the CCD by a cross-linker.

114. The recombinant polypeptide of claim 113, wherein the payload molecule is a cytotoxic drug selected from the group consisting of doxorubicin, nemorubicin, PNU-159682, paclitaxel, docetaxel, auristatin E, auristatin F, dolastatin 10, dolastatin 15, monomethyl auristatin E (MMAE), monomethyl auristatin F (MMAF), monomethyl auristatin D (MMAD), maytansine, mertansine (DM1), maytansinoid DM4, calicheamicin, N-acetyl-calicheamicin, vinblastine, vincristine, vindesine, vinorelbine, camptothecin, topotecan, irinotecan, SN-38, duocarmycin A, duocarmycin B1, duocarmycin B2, duocarmycin C1, duocarmycin C2, duocarmycin D, duocarmycin SA, duocarmycin TM, duocarmycin MB, duocarmycin DM, mitomycin C, rachelmycin, epothilone A, epothilone B, epothilone C, tubulysin B, tubulysin M, pyrrolobenzodiazepine (PBD), and bortezomib.

115. The recombinant polypeptide of claim 114, wherein the payload molecule is monomethyl auristatin E (MMAE) or monomethyl auristatin F (MMAF).

116. The recombinant polypeptide of claim 114, wherein the payload molecule is mertansine (DM1).

117. The recombinant polypeptide of claim 113, wherein the payload molecule is a biologically active protein selected from the group consisting of TNFα, IL-12, ranpirnase, human ribonuclease (RNAse), bovine pancreatic RNase, pokeweed antiviral protein, Pseudomonas exotoxin A, gelonin, ricin-A, interferon-alpha, interferon-lambda, urease, amatoxin, alpha-amanitin, beta-amanitin, gamma-amanitin, epsilon-amanitin, bouganin, and staphylococcal enterotoxin.

118. The recombinant polypeptide of claim 113, wherein the recombinant polypeptide is fully conjugated such that a payload molecule is conjugated to each cysteine residue of the CCD.

119. The recombinant polypeptide of claim 118, wherein the recombinant polypeptide is capable of being separated from a recombinant polypeptide that is not fully conjugated with a peak separation value >6, wherein the peak separation value is defined as (t_{R2}-t_{R1})/FWHM, wherein
(a) t_{R2} represents retention time by reverse phase HPLC of a peak corresponding to the recombinant polypeptide that is fully conjugated;
(b) t_{R1} represents retention time by reverse phase HPLC of a peak corresponding to the recombinant polypeptide that is not fully conjugated and that is closest to the peak corresponding to the fully conjugated recombinant polypeptide; and
(c) FWHM represents full width at half maximum of the peak corresponding to the recombinant polypeptide that is fully conjugated.

120. The recombinant polypeptide of claim 113, further comprising a first targeting moiety (TM), wherein the first TM is selected from the group consisting of an IgG antibody, a Fab fragment, a F(ab′)2 fragment, a scFv, a scFab, a dAb, a single domain heavy chain antibody, and a single domain light chain antibody, and wherein the TM is capable of specifically binding a ligand associated with a target tissue.

121. The recombinant polypeptide of claim 120, wherein the first TM is an IgG antibody.

122. The recombinant polypeptide of claim 120, wherein the first TM is linked to an N-terminus or a C-terminus of the CCD.

123. The recombinant polypeptide of claim 120, wherein the ligand is associated with a tumor, a cancer cell, or a tissue with an inflammatory condition.

124. A pharmaceutical composition, comprising the recombinant polypeptide of claim 120 and a pharmaceutically acceptable carrier.

125. The pharmaceutical composition of claim 124 for use in the treatment of a disease in a subject, wherein the disease is selected from the group consisting of breast cancer, ER/PR+ breast cancer, Her2+ breast cancer, triple-negative breast cancer, liver carcinoma, lung cancer, non-small cell lung cancer, colorectal cancer, esophageal carcinoma, fibrosarcoma, choriocarcinoma, ovarian cancer, cervical carcinoma, laryngeal carcinoma, endometrial carcinoma, hepatocarcinoma, gastric cancer, prostate cancer, renal cell carcinoma, Kaposi's sarcoma, astrocytoma, melanoma, squamous cell cancer, basal cell carcinoma, head and neck cancer, thyroid carcinoma, Wilm's tumor, urinary tract carcinoma, thecoma, arrhenoblastoma, glioblastomoa, pancreatic cancer, leukemia, acute myeloid leukemia (AML), chronic myeloid leukemia (PCML), acute lymphocytic leukemia (ALL), chronic lymphocytic leukemia (CLL), T-cell acute lymphoblastic leukemia, lymphoblastic disease, multiple myeloma, Hodgkin's lymphoma, non-Hodgkin's lymphoma, acne vulgaris, asthma, autoimmune diseases, autoinflammatory diseases, celiac disease, chronic prostatitis, glomerulonephritis, hypersensitivity reaction, inflammatory bowel disease, Crohn's disease, pelvic inflammatory disease, reperfusion injury, rheumatoid arthritis, sarcoidosis, transplant rejection, vasculitis, psoriasis, fibromyalgia, irritable bowel syndrome, lupus erythematosis, osteoarthritis, scleroderma, and ulcerative colitis.

126. The pharmaceutical composition of claim 124 for use in a pharmaceutical regimen for treatment of a disease in a subject.

127. The pharmaceutical composition of claim 126, wherein the pharmaceutical regimen further comprises the step of determining the amount of pharmaceutical composition needed to achieve a beneficial effect in the subject having the disease.

128. A method of treating a disease in a subject, comprising administering a therapeutically effective dose of the pharmaceutical composition of claim 124 to a subject in need thereof.

129. The method of claim 128, wherein the disease is selected from the group consisting of breast cancer, ER/PR+ breast cancer, Her2+ breast cancer, triple-negative breast cancer, liver carcinoma, lung cancer, non-small cell lung cancer, colorectal cancer, esophageal carcinoma, fibrosarcoma, choriocarcinoma, ovarian cancer, cervical carcinoma, laryngeal carcinoma, endometrial carcinoma, hepatocarcinoma, gastric cancer, prostate cancer, renal cell carcinoma, Kaposi's sarcoma, astrocytoma, melanoma, squamous cell cancer, basal cell carcinoma, head and neck cancer, thyroid carcinoma, Wilm's tumor, urinary tract carcinoma, thecoma, arrhenoblastoma, glioblastomoa, and pancreatic cancer.

130. The method of claim 129, wherein the first targeting moiety has specific binding affinity for a tumor of the disease.

131. The method of claim 129, wherein the first targeting moiety has specific binding affinity for a target set forth in Table 2, Table 3, Table 4, Table 18, and Table 19.

132. The method of claim 129, wherein administering the therapeutically effective dose results in at least a 10% improvement of a parameter associated with the disease compared to an untreated subject, wherein the parameter is selected from the group consisting of time-to-progression of the disease, time-to-relapse, time-to-discovery of local recurrence, time-to-discovery of regional metastasis, time-to-discovery of distant metastasis, time-to-onset of symptoms, pain, body weight, hospitalization, time-to-increase in pain medication requirement, time-to-requirement of salvage chemotherapy, time-to-requirement of salvage surgery, time-to-requirement of salvage radiotherapy, time-to-treatment failure, and time of survival.

133. The method of claim 130, wherein administering the therapeutically effective dose results in a decrease in size of the tumor of the disease.

134. The method of claim 133, wherein the decrease in size of the tumor is at least a 10% decrease.

135. The method of claim 133, wherein the decrease in size of the tumor is achieved within at least about 10 days after administering the therapeutically effective dose.

136. The method of claim 130, wherein administering the therapeutically effective dose results in tumor stasis in the subject.

137. The method of claim 136, wherein tumor stasis is achieved within at least about 21 days after administering the therapeutically effective dose.

138. The method of claim 128, comprising administering a therapeutically effective dose every 7 days, every 10 days, every 14 days, every 21 days, or every 30 days.

139. The method of claim 128, wherein the recombinant polypeptide of the pharmaceutical composition exhibits a terminal half-life that is longer than at least about 72 h when administered to the subject.

140. An isolated nucleic acid comprising a polynucleotide sequence selected from (a) a polynucleotide encoding the recombinant polypeptide of claim 111 and (b) the complement of the polynucleotide of (a).

141. An expression vector comprising the polynucleotide sequence of claim 140 and a recombinant regulatory sequence operably linked to the polynucleotide sequence.

142. An isolated host cell, comprising the expression vector of claim 141.

143. The host cell of claim 142, wherein the host cell is E. coli.
